(19) United States
(12) Patent Application Publication
(10) Pub. No.: US 2022/0364159 A1
(43) Pub. Date: Nov. 17, 2022

(54) COMPOSITIONS FOR DETECTION OF DNA AND METHODS OF USE THEREOF

(71) Applicant: Mammoth Biosciences, Inc., Brisbane, CA (US)

(72) Inventors: James Paul Broughton, San Francisco, CA (US); Janice Sha Chen, San Francisco, CA (US); Lucas Benjamin Harrington, Berkeley, CA (US)

(21) Appl. No.: 17/629,895

(22) PCT Filed: Jul. 22, 2020
(86) PCT No.: PCT/US2020/043139

§ 371 Date: Jan. 25, 2022

Related U.S. Application Data
(60) Provisional application No. 62/879,315, filed on Jul. 26, 2019.

(51) Int. Cl. C12Q 1/6816; C12N 9/22

(52) U.S. Cl. CPC C12Q 1/6816; C12N 9/22; C12N 2310/20

(57) ABSTRACT

Described herein are methods and systems for direct detection of DNA nucleic acids using a DNA-activated programmable RNA nuclease.

### CROSS-REFERENCE

[0001] The present application is a U.S. National Stage Application under 35 U.S.C. § 371 of International PCT Application No. PCT/US2020/043139, filed on Jul. 22, 2020, which claims priority to and benefit from U.S. Provisional Application No. 62/879,315, filed on Jul. 26, 2019, the entire contents of each of which are herein incorporated by reference.

### DESCRIPTION OF THE TEXT FILE SUBMITTED ELECTRONICALLY

[0002] The contents of the text file submitted electronically herewith are incorporated herein by reference in its entirety: A computer readable format copy of the Sequence Listing (filename: MABI_004_01US_SubSeqList_ST25.txt, date created: Jul. 21, 2022, file size: ˜1,043,406 bytes.

### BACKGROUND

[0003] Detection of specific nucleic acids often requires time- and resource-intensive steps such as sequence amplification or reverse transcription. Simpler methods are needed to increase efficiency and decrease costs of detection methods.

### SUMMARY

[0004] Described herein are methods, compositions, reagents, enzymes, and kits for detection of target nucleic acids. The methods, compositions, reagents, enzymes, and kits may comprise reagents of a guide nucleic acid targeting a target nucleic acid, a programmable nuclease, and a single stranded detector nucleic acid with a detection moiety. The target nucleic acid of interest may be indicative of a disease, and the disease may be communicable diseases. The detection of the disease may provide guidance on treatment or intervention to reduce the transmission of the disease.

[0005] In various aspects, the present disclosure provides a composition comprising: a) a DNA-activated programmable RNA nuclease; and b) an engineered guide nucleic acid comprising a first segment that is reverse complementary to a segment of a target deoxyribonucleic acid,

[0006] wherein the engineered guide nucleic acid comprises a second segment that binds to the DNA-activated programmable RNA nuclease to form a complex.

[0007] In some aspects, the composition further comprises a detector nucleic acid. In some aspects, the detector nucleic acid comprises an RNA sequence. In some aspects, the detector nucleic acid is an RNA reporter. In some aspects, the composition further comprises the target deoxyribonucleic acid. In some aspects, the target deoxyribonucleic acid is an amplicon of a nucleic acid. In some aspects, the nucleic acid is a deoxyribonucleic acid or a ribonucleic acid.

[0008] In some aspects, the DNA-activated programmable RNA nuclease comprises a HEPN domain. In some aspects, the DNA-activated programmable RNA nuclease comprises two HEPN domains.

[0009] In some aspects, the DNA-activated programmable RNA nuclease is a Type VI CRISPR/Cas enzyme. In some aspects, the DNA-activated programmable RNA nuclease is a Cas13 protein. In some aspects, the Cas13 protein comprises a Cas13a polypeptide, a Cas13b polypeptide, a Cas13c polypeptide, a Cas13c polypeptide, a Cas13d polypeptide, or a Cas13e polypeptide. In further aspects, the Cas13 protein is a Cas13a polypeptide. In still further aspects, the Cas13a polypeptide is LbuCas13a or LwaCas13a.

[0010] In some aspects, the DNA-activated programmable RNA nuclease has at least 80%, at least 85%, at least 90%, at least 92%, at least 95%, at least 97%, or at least 99% sequence identity to any one of SEQ ID NO: 18-SEQ ID NO: 35. In some aspects, the DNA-activated programmable RNA nuclease is selected from any one of SEQ ID NO: 18-SEQ ID NO: 35.

[0011] In some aspects, the composition has a pH from pH 6.8 to pH 8.2. In some aspects, the target deoxyribonucleic acid lacks a guanine at the 3′ end. In some aspects, the terminal 3′ nucleotide in the segment of the target deoxyribonucleic acid is A, C or T. In some aspects, the target deoxyribonucleic acid is a single-stranded deoxyribonucleic acid. In some aspects, the target deoxyribonucleic acid is single stranded deoxyribonucleic acid oligonucleotides. In some aspects, the target deoxyribonucleic acid is genomic single stranded deoxyribonucleic acids. In some aspects, the target deoxyribonucleic acid has a length of from 18 to 100 nucleotides. In further aspects, the target deoxyribonucleic acid has a length of from 18 to 30 nucleotides. In still further aspects, the target deoxyribonucleic acid has a length of 20 nucleotides. In some aspects, the composition is present within a support medium.

[0012] In some aspects, the composition further comprises a second engineered guide nucleic acid comprising a first segment that is reverse complementary to a segment of a second target deoxyribonucleic acid; and a DNA-activated programmable DNA nuclease, wherein the second engineered guide nucleic acid comprises a second segment that binds to the DNA-activated programmable DNA nuclease to form a complex. In some aspects, the composition further comprises a DNA reporter. In some aspects, the DNA-activated programmable DNA nuclease comprises a RuvC catalytic domain. In some aspects, the DNA-activated programmable DNA nuclease comprises a type V CRISPR/Cas enzyme.

[0013] In some aspects, the target deoxyribonucleic acid is a reverse transcribed ribonucleic acid. In some aspects, the composition further comprises a reagent for reverse transcription. In some aspects, the composition further comprises a reagent for amplification. In some aspects, the composition further comprises a reagent for in vitro transcription. In some aspects, the reagent for reverse transcription comprises a reverse transcriptase, an oligonucleotide primer, dNTPs, or any combination thereof. In some aspects, the reagent for amplification comprises a primer, a polymerase, dNTPs, or any combination thereof. In some aspects, the reagent for in vitro transcription comprise an RNA polymerase, NTPs, a primer, or any combination thereof.

[0014] In various aspects, the present disclosure provides a method of assaying for a target deoxyribonucleic acid in a sample, the method comprising: contacting the sample to the compostions of any of the above compositions; and assaying for a signal produced by cleavage of at least some RNA reporters of a plurality of RNA reporters by the DNA-activated programmable RNA nuclease upon hybridization of the first segment of the engineered guide nucleic acid to the segment of the target deoxyribonucleic acid.

[0015] In various aspects, the present disclosure provides a method of assaying for a target ribonucleic acid in a sample, the method comprising: amplifying the target ribonucleic acid in a sample to produce a target deoxyribonucleic acid; contacting the target deoxyribonucleic acid to the composition of any of the above compositions; and assaying for a signal produced by cleavage of at least some RNA reporters of a plurality of RNA reporters by the DNA-activated programmable RNA nuclease upon hybridization of the first segment of the engineered guide nucleic acid to the segment of the target deoxyribonucleic acid.

[0016] In various aspects, the present disclosure provides the use of any of the above compositions in a method of assaying for a target deoxyribonucleic acid in a sample.

[0017] In various aspects, the present disclosure provides the use of a DNA-activated programmable RNA nuclease in a method of assaying for a target deoxyribonucleic acid in a sample according to any of the above methods.

[0018] In various aspects, the present disclosure provides the use of a DNA-activated programmable RNA nuclease in a method of assaying for a target ribonucleic acid in a sample according to any of the above methods.

[0019] In some aspects, a composition comprises a DNA-activated programmable RNA nuclease; and a guide nucleic acid comprising a segment that is reverse complementary to a segment of a target deoxyribonucleic acid, wherein the DNA-activated programmable RNA nuclease binds to the guide nucleic acid to form a complex. In some aspects, the composition further comprises an RNA reporter. In some aspects, the composition further comprises the target deoxyribonucleic acid. In some aspects, the target deoxyribonucleic acid is an amplicon of a nucleic acid. In some aspects, the nucleic acid is a deoxyribonucleic acid or a ribonucleic acid.

[0020] In some aspects, the DNA-activated programmable RNA nuclease is a Type VI CRISPR/Cas enzyme. In some aspects, the DNA-activated programmable RNA nuclease is a Cas13. In some aspects, the DNA-activated programmable RNA nuclease is a Cas13a. In some aspects, the Cas13a is Lbu-Cas13a or Lwa-Cas13a. In some aspects, the composition has a pH from pH 6.8 to pH 8.2 In some aspects, the target deoxyribonucleic acid lacks a guanine at the 3′ end. In some aspects, the target deoxyribonucleic acid is a single-stranded deoxyribonucleic acid. In some aspects, the composition further comprises a support medium. In some aspects, the composition further comprises a lateral flow assay device. In some aspects, the composition further comprises a device configured for fluorescence detection. In some aspects, the composition further comprises a second guide nucleic acid and a DNA-activated programmable DNA nuclease, wherein the second guide nucleic acid comprises a segment that is reverse complementary to a segment of a second target deoxyribonucleic acid comprising a guide nucleic acid. In some aspects, the composition further comprises a DNA reporter. In some aspects, the DNA-activated programmable DNA nuclease is a Type V CRISPR/Cas enzyme. In some aspects, the DNA-activated programmable DNA nuclease is a Cas12. In some aspects, the Cas12 is a Cas12a, Cas12b, Cas12c, Cas12d, or Cas12e. In some aspects, the DNA-activated programmable DNA nuclease is a Cas14. In some aspects, the Cas14 is a Cas14a, Cas14b, Cas14c, Cas14d, Cas14e, Cas14f, Cas14g, or Cas14h.

[0021] In some aspects, a method of assaying for a target deoxyribonucleic acid in a sample comprises contacting the sample to a complex comprising a guide nucleic acid and a DNA-activated programmable RNA nuclease, wherein the guide nucleic acid comprises a segment that is reverse complementary to a segment of the target deoxyribonucleic acid, and assaying for a signal produced by cleavage of at least some RNA reporters of a plurality of RNA reporters.

[0022] In some aspects, a method of assaying for a target ribonucleic acid in a sample comprises amplifying a nucleic acid in a sample to produce a target deoxyribonucleic acid, contacting the target deoxyribonucleic acid to a complex comprising a guide nucleic acid and a DNA-activated programmable RNA nuclease, wherein the guide nucleic acid comprises a segment that is reverse complementary to a segment of the target deoxyribonucleic acid, and assaying for a signal produced by cleavage of at least some RNA reporters of a plurality of RNA reporters.

[0023] In some aspects, the DNA-activated programmable RNA nuclease is a Type VI CRISPR nuclease. In some aspects, the DNA-activated programmable RNA nuclease is a Cas13. In some aspects, the Cas13 is a Cas13a. In some aspects, the Cas13a is Lbu-Cas13a or Lwa-Cas13a. In some aspects, cleavage of the at least some RNA reporters of the plurality of reporters occurs from pH 6.8 to pH 8.2. In some aspects, the target deoxyribonucleic acid lacks a guanine at the 3′ end. In some aspects, the target deoxyribonucleic acid is a single-stranded deoxyribonucleic acid. In some aspects, the target deoxyribonucleic acid is an amplicon of a ribonucleic acid. In some aspects, the target deoxyribonucleic acid or the ribonucleic acid is from an organism. In some aspects, the organism is a virus, bacteria, plant, or animal. In some aspects, the target deoxyribonucleic acid is produced by a nucleic acid amplification method. In some aspects, the nucleic acid amplification method is isothermal amplification. In some aspects, the nucleic acid amplification method is thermal amplification. In some aspects, the nucleic acid amplification method is recombinase polymerase amplification (RPA), transcription mediated amplification (TMA), strand displacement amplification (SDA), helicase dependent amplification (HDA), loop mediated amplification (LAMP), rolling circle amplification (RCA), single primer isothermal amplification (SPIA), ligase chain reaction (LCR), simple method amplifying RNA targets (SMART), or improved multiple displacement amplification (IMDA), or nucleic acid sequence-based amplification (NASBA). In some aspects, the signal is fluorescence, luminescence, colorimetric, electrochemical, enzymatic, calorimetric, optical, amperometric, or potentiometric. In some aspects, the method further comprises contacting the sample to a second guide nucleic acid and a DNA-activated programmable DNA nuclease, wherein the second guide nucleic acid comprises a segment that is reverse complementary to a segment of a second target deoxyribonucleic acid comprising a guide nucleic acid. In some aspects, the method further comprises assaying for a signal produced by cleavage of at least some DNA reporters of a plurality of DNA reporters. In some aspects, the DNA-activated programmable DNA nuclease is a Type V CRISPR nuclease. In some aspects, the DNA-activated programmable DNA nuclease is a Cas12. In some aspects, the Cas12 is a Cas12a, Cas12b, Cas12c, Cas12d, or Cas12e. In some aspects, the DNA-activated programmable DNA nuclease is a Cas14. In some aspects, the Cas14 is a Cas14a, Cas14b, Cas14c, Cas14d, Cas14e, Cas14f, Cas14g, or Cas14h. In some aspects, the guide nucleic acid comprises a crRNA. In some aspects, the guide nucleic acid comprises a crRNA and a tracrRNA. In some aspects, the signal is present prior to cleavage of the at least some RNA reporters. In some aspects, the signal is absent prior to cleavage of the at least some RNA reporters. In some aspects, the sample comprises blood, serum, plasma, saliva, urine, mucosal sample, peritoneal sample, cerebrospinal fluid, gastric secretions, nasal secretions, sputum, pharyngeal exudates, urethral or vaginal secretions, an exudate, an effusion, or tissue. In some aspects, the method is carried out on a support medium. In some aspects, the method is carried out on a lateral flow assay device. In some aspects, the method is carried out on a device configured for fluorescence detection.

### INCORPORATION BY REFERENCE

[0024] All publications, patents, and patent applications mentioned in this specification are herein incorporated by reference to the same extent as if each individual publication, patent, or patent application was specifically and individually indicated to be incorporated by reference.

### BRIEF DESCRIPTION OF THE DRAWINGS

[0025] The patent or application file contains at least one drawing executed in color. Copies of this patent or patent application publication with color drawing(s) will be provided by the Office upon request and payment of the necessary fee. The novel features of the disclosure are set forth with particularity in the appended claims. A better understanding of the features and advantages of the present disclosure will be obtained by reference to the following detailed description that sets forth illustrative embodiments, in which the principles of the disclosure are utilized, and the accompanying drawings of which:

[0026] FIG. 1 shows Cas13a detection of target RT-LAMP DNA amplicon.

[0027] FIG. 1A shows a schematic of the workflow including providing DNA/RNA, LAMP/RT-LAMP, and Cas13a detection.

[0028] FIG. 1B shows Cas13a specific detection of target RT-LAMP DNA amplicon with a first primer set as measured by background subtracted fluorescence on the y-axis.

[0029] FIG. 1C shows Cas13a specific detection of target RT-LAMP DNA amplicon with a second primer set as measured by background subtracted fluorescence on the y-axis.

[0030] FIG. 2 shows experimental results from a Cas13 detection assay.

[0031] FIG. 2A shows a Cas13 detection assay using 2.5 nM RNA, single-stranded DNA (ssDNA), or double-stranded (dsDNA) as target nucleic acids, where detection was measured by fluorescence for each of the target nucleic acid tested.

[0032] FIG. 2B shows Cas12 detection assay using 2.5 nM RNA, ssDNA, and dsDNA as target nucleic acids, where detection was measured by fluorescence for each of the target target nucleic acid tested.

[0033] FIG. 2C shows the performance of Cas13 and Cas12 on target RNA, target ssDNA, and target dsDNA at various concentrations, where detection was measured by fluorescence for each of the target nucleic acids tested.

[0034] FIG. 3 shows an Lbu-Cas13a (SEQ ID NO: 19) detection assay using 2.5 nM target ssDNA with 170 nM of various reporter substrates, wherein detection was measured by fluorescence for each of the reporter substrates tested.

[0035] FIG. 4 shows experimental results of a Cas13 detection assay.

[0036] FIG. 4A shows the results of Cas13 detection assays for Lbu-Cas13a (SEQ ID NO: 19) and Lwa-Cas13a (SEQ ID NO: 25) using 10 nM of target RNA or no target RNA (shown as 0 nM), where detection was measured by fluorescence resulting from cleavage of reporters over time.

[0037] FIG. 4B shows the results of Cas13 detection assays for Lbu-Cas13a (SEQ ID NO: 19) and Lwa-Cas13a (SEQ ID NO: 25) using 10 nM of target ssDNA or no target ssDNA (shown as 0 nM), where detection was measured by fluorescence resulting from cleavage of reporters over time.

[0038] FIG. 5 shows Lbu-Cas13a (SEQ ID NO: 19) detection assay using 1 nM target RNA (at left) or target ssDNA (at right) in buffers with various pH values ranging from 6.8 to 8.2.

[0039] FIG. 6 shows setup and experimental results of a Cas13 detection assay.

[0040] FIG. 6A shows guide RNAs (gRNAs) tiled along a target sequence at 1 nucleotide intervals.

[0041] FIG. 6B shows Cas13M26 detection assays using 0.1 nM target RNA or 2 nM target ssDNA with gRNAs tiled at 1 nucleotide intervals and an off-target gRNA.

[0042] FIG. 6C shows data from FIG. 6B ranked by performance of target ssDNA.

[0043] FIG. 6D shows performance of gRNAs for each nucleotide on a 3′ end of a target RNA.

[0044] FIG. 6E shows performance of gRNAs for each nucleotide on a 3′ end of a target ssDNA.

[0045] FIG. 7 shows experimental results from a Lbu-Cas13a (SEQ ID NO: 19) detection assays.

[0046] FIG. 7A shows Lbu-Cas13a (SEQ ID NO: 19) detection assays using 1 μL of target DNA amplicon from various LAMP isothermal nucleic acid amplification reactions.

[0047] FIG. 7B shows Cas13M26 detection assays using various amounts of PCR reaction as a target DNA.

[0048] FIG. 8 shows results from detection assays using a Cas13a DNA-activated programmable RNA nuclease, ssDNA target oligonucleotides, guide RNAs, and a reporter.

[0049] FIG. 8A shows results from assays in which ssDNA oligonucleotides were present at 2 nM.

[0050] FIG. 8B shows results from assays in which ssDNA oligonucletoides were not present (shown as 0 μM).

[0051] FIG. 9 shows results from detection assays using a Cas13a DNA-activated programmable RNA nuclease, ssDNA genome from the bacteriophage M13mp18, guide RNAs, and a reporter.

[0052] FIG. 9A shows results from assays in which the R1490 guide was used.

[0053] FIG. 9B shows results from assays in which the R1488 guide was used.

[0054] FIG. 9C shows results from assays in which the R1491 guide was used.

[0055] FIG. 10 illustrates the raw HMM for PF07282.

[0056] FIG. 11 illustrates the raw HMM for PF18516.

### DETAILED DESCRIPTION

[0057] The capability to quickly and accurately detect the presence of a target nucleic acid can provide valuable information associated with the presence of the target nucleic acid. For example, the capability to quickly and accurately detect the presence of an ailment provides valuable information and leads to actions to reduce the progression or transmission of the ailment. Detection of a target nucleic acid molecule encoding a specific sequence using a programmable nuclease provides a method for efficiently and accurately detecting the presence of the nucleic acid molecule of interest. There exists a need for direct sequence detection methods, in particular methods to directly and robustly detect DNA encoding a specific sequence. Such direct detection methods may reduce reagent and labor costs and decrease the time to result of the detection assay.

[0058] Provided herein are programmable nucleases capable of directly detecting DNA in a sample. In some embodiments, the present disclosure provides a composition comprising a DNA-activated programmable RNA nuclease. In some embodiments, the present disclosure provides a composition comprising a DNA-activated programmable RNA nuclease, an engineered guide nucleic acid comprising a segment that is reverse complementary to a segment of a target deoxyribonucleic acid, wherein the DNA-activated programmable RNA nuclease binds to the engineered guide nucleic acid to form a complex, and a RNA reporter, and optionally, further comprising a target deoxyribonucleic acid. In some embodiments, the present disclosure provides methods, systems, enzymes, and kits for direct detection of DNA with a programmable nuclease. The programmable nuclease may be a DNA-activated programmable RNA nuclease. The DNA-activated programmable RNA nuclease may be a Type VI CRISPR/Cas enzyme. For example, in some embodiments, the present disclosure provides a Cas13 protein for direct detection of DNA in a sample. In particular embodiments, the Cas13 protein can be a Cas13a protein. In some embodiments, a DNA-activated programmable RNA nuclease is multiplexed with a DNA-activated programmable RNA nuclease for detection of two target deoxynucleic acids that encode different sequences.

[0059] The detection of the disease in an individual, especially at the early stages of the disease, may provide guidance on treatments or interventions to reduce the progression of the disease. Additionally, the detection of traits of the disease, such as resistance to an antibiotic, can be useful for informing treatment of the disease. The detection of the disease in the environment may provide guidance on interventions to reduce or minimize a potential epidemic or transmission of the disease. The capability to quickly and accurately detect the presence of a disease in a biological or environmental sample can provide valuable information and lead to actions to reduce the transmission of the disease.

[0060] Additionally, early detection of cancers and genetic disorders can be important for initiating treatment. Individuals with cancer or genetic disorders may have poor outcomes, including severe symptoms that can lead to death, if left undetected. The detection of the cancer or genetic disorder in an individual, especially at the early stages of the cancer or genetic disorder, may provide guidance on treatments or interventions to reduce the progression of the cancer or maladies associated with progression of the genetic disorder.

[0061] The present disclosure provides various methods, reagents, enzymes, and kits for rapid lab tests, which may quickly assess whether a target nucleic acid is present in a sample by using a DNA-activated programmable RNA nuclease that can detect the presence of a nucleic acid of interest (e.g., a deoxyribonucleic acid or a deoxyribonucleic acid amplicon of the nucleic acid of interest, which can be the target deoxyribonucleic acid) and generating a detectable signal indicating the presence of said nucleic acid of interest. The methods and programmable nucleases disclosed herein can be used as a companion diagnostic with any of the diseases disclosed herein (e.g., RSV, sepsis, flu), or can be used in reagent kits, point-of-care diagnostics, or over-the-counter diagnostics. The methods or reagents may be used as a point of care diagnostic or as a lab test for detection of a target nucleic acid and, thereby, detection of a condition in a subject from which the sample was taken. The methods or reagents may be used in various sites or locations, such as in laboratories, in hospitals, in physician offices/laboratories (POLs), in clinics, at remotes sites, or at home. Sometimes, the present disclosure provides various devices, systems, fluidic devices, and kits for consumer genetic use or for over the counter use.

[0062] Furthermore, detection of a target nucleic acid can provide genetic information of the sample, which is consistent with the methods, compositions, reagents, enzymes, and kits described herein. A target nucleic acid that provides genetic information can include, but is not limited to, a nucleic acid encoding a sequence associated with organism ancestry (e.g., a nucleic acid comprising a sequence encoding a single nucleotide polymorphism that identifies geographical ancestry, ancestry from an ethnic group, etc.); a sequence for trait not associated with a communicable disease, cancer, or genetic disorder; a sequence for a phenotypic trait (e.g., a sequence from a gene for blue eyes, brown hair color, fast or slow metabolism of a drug such as caffeine, an intolerance such as lactose intolerance, etc.), or a sequence for genotyping (e.g., a sequence for a gene that is recessive, such as the gene for Taye-Sachs disease).

[0063] Described herein are methods, compositions, reagents, enzymes, and kits for detecting the presence of a target nucleic acid in a sample. The methods, compositions, reagents, enzymes, and kits for detecting the presence of a target nucleic acid in a sample can be used in a rapid lab tests for direct detection of a target nucleic acid encoding a sequence of interest. In particular, provided herein are methods, reagents, enzymes, and kits which may enable the direct detection of target DNA sequences. Also disclosed herein are devices comprising the reagents, enzymes (e.g., a DNA-activated programmable RNA nuclease), and kits of this disclosure. A device of this disclosure may comprise a fluidic device, reagents for detecting a target nucleic acid in a sample, and a solid support.

[0064] In one aspect, described herein, is a method for detecting a target nucleic acid, such as a single-stranded DNA, in a sample. The method may comprise contacting the sample with an engineered guide nucleic acid capable of binding a target nucleic acid sequence; a programmable nuclease capable of being activated when complexed with the engineered guide nucleic acid and the target sequence; and a single stranded detector nucleic acid comprising a detection moiety, wherein the detector nucleic acid is capable of being cleaved by the activated nuclease, thereby generating a first detectable signal. In some embodiments, the programmable nuclease is a DNA-activated programmable RNA nuclease. In some embodiments, the method comprises a DNA-activated programmable RNA nuclease for detecting a first target deoxyribonucleic acid and a a DNA-activated programmable RNA nuclease for detecting a second deoxyribonucleic acid. In some embodiments, the first deoxyribonucleic acid and the second deoxyribonucleic acid encode different sequences. In some embodiments, the first deoxyribonucleic acid and the second deoxyribonucleic acid encode the same sequence.

[0065] In another aspect, described herein are reagents for detecting a target nucleic acid, such as a single-stranded DNA reporter, the reagents comprising a reagent chamber and a support medium for detection of the first detectable signal. The reagent chamber comprises an engineered guide nucleic acid comprising a segment that is reverse complementary to the target nucleic acid; a programmable nuclease capable of being activated when complexed with the engineered guide nucleic acid and the target nucleic acid; and a single stranded detector nucleic acid comprising a detection moiety, wherein the detector nucleic acid is capable of being cleaved by the activated nuclease, thereby generating a first detectable signal. In some embodiments, the programmable nuclease is a DNA-activated programmable RNA nuclease.

[0066] Also described herein is a kit for detecting a target nucleic acid. The kit may comprise an engineered guide nucleic acid that binds to a target nucleic acid, preferably DNA; a programmable nuclease capable of being activated when complexed with the engineered guide nucleic acid and the target nucleic acid; and a single stranded detector nucleic acid comprising a detection moiety, wherein the detector nucleic acid is capable of being cleaved by the activated nuclease, thereby generating a first detectable signal.

[0067] A sample can be a biological sample or an environmental sample. A biological sample can be from an individual and can be tested to determine whether the individual has a communicable disease. The biological sample can be tested to detect the presence or absence of at least one target nucleic acid from a bacterium or a virus or a pathogen responsible for the disease. The at least one target nucleic acid from a bacterium or a pathogen responsible for the disease that is detected can also indicate that the bacterium or pathogen is wild-type or comprises a mutation that confers resistance to treatment, such as antibiotic treatment. The biological sample can be tested to detect the presence or absence of at least one target nucleic acid expressed in a cancer or genetic disorder. An environmental sample can comprise a biological material and can be tested to determine whether the content of the biological material. For example, the environmental sample can be tested to detect the presence or absence of at least one target nucleic acid from a bacterium or a virus or a pathogen, which in some cases, can be responsible for a disease (e.g., a human pathogenic disease or an agricultural disease). The at least one target nucleic acid from a bacterium or a pathogen responsible for the disease that is detected can also indicate that the bacterium or pathogen is wild-type or comprises a mutation that confers resistance to treatment, such as antibiotic treatment. A sample from an individual or from an environment is applied to the reagents described herein. If the target nucleic acid is present in the sample, the target nucleic acid binds to the engineered guide nucleic acid to activate the DNA-activated programmable RNA nuclease. The activated DNA-activated programmable RNA nuclease cleaves the detector RNA and generates a detectable signal that can be visualized, for example on a support medium, by eye, or using a spectrometer. If the target nucleic acid is absent in the sample or below the threshold of detection, the engineered guide nucleic acid remains unbound, the DNA-activated programmable RNA nuclease remains inactivated, and the detector RNA remains uncleaved.

[0068] Such methods, compositions, reagents, enzymes, and kits described herein may allow for direct detection of target deoxyribonucleic acid, such as a target single-stranded DNA, and in turn the pathogen and disease associated with the target nucleic acid or the cancer or genetic disorder associated with the target nucleic acid, in remote regions or low resource settings without specialized equipment. Also, such methods, compositions, reagents, enzymes, and kits described herein may allow for detection of target nucleic acid, and in turn the pathogen and disease associated with the target nucleic acid or the cancer or genetic disorder associated with the target nucleic acid, in healthcare clinics or doctor offices without specialized equipment. In some cases, this provides a point of care testing for users to easily test for a disease, cancer, or genetic disorder at home or quickly in an office of a healthcare provider. Assays that deliver results in under an hour, for example, in 15 to 60 minutes, are particularly desirable for at home testing for many reasons. Antivirals can be most effective when administered within the first 48 hours and improve antibiotic stewardship. Thus, the systems and assays disclosed herein, which are capable of delivering results in under an hour can will allow for the delivery of anti-viral therapy at an optimal time. Additionally, the systems and assays provided herein, which are capable of delivering quick diagnoses and results, can help keep or send a patient at home, improve comprehensive disease surveillance, and prevent the spread of an infection. In other cases, this provides a test, which can be used in a lab to detect a nucleic acid sequence of interest in a sample from a subject. Also provided herein are devices, compositions, systems, fluidic devices, and kits, wherein the rapid lab tests can be performed in a single system. In some cases, this may be valuable in detecting diseases and pathogens, cancer, or a genetic disorder in a developing country and as a global healthcare tool to detect the spread of a disease or efficacy of a treatment or provide early detection of a cancer or genetic disorder.

[0069] The methods as described herein in some instances comprise obtaining a cell-free DNA sample, amplifying DNA from the sample, using a DNA-activated programmable RNA nuclease to cleave detector RNA, and reading the output of the cleavage. In other instances, the method comprises obtaining a fluid sample from a patient, and without amplifying a nucleic acid of the fluid sample, using a DNA-activated programmable RNA nuclease to cleave detector RNA, and detecting the cleavage of the detector RNA. A number of samples, engineered guide nucleic acids, DNA-activated programmable RNA nuclease, support mediums, target nucleic acids, single-stranded detector nucleic acids, and reagents are consistent with the devices, systems, fluidic devices, kits, and methods disclosed herein. Furthermore, these can be multiplexed with a second programmable nuclease, such a DNA-activated programmable DNA nuclease.

[0070] Also disclosed herein are detector nucleic acids and methods detecting a target nucleic using the detector nucleic acids. Reporter and detector as used herein are interchangeably with reporter nucleic acid (e.g., RNA, DNA) or detector nucleic acid (e.g., RNA, DNA). Often, the detector nucleic acid is a protein-nucleic acid. For example, a method of assaying for a target nucleic acid in a sample comprises contacting the sample to a complex comprising an engineered guide nucleic acid comprising a segment that is reverse complementary to a segment of the target nucleic acid and a programmable nuclease that exhibits sequence independent cleavage upon forming a complex comprising the segment of the engineered guide nucleic acid binding to the segment of the target nucleic acid; and assaying for a signal indicating cleavage of at least some protein-nucleic acids of a population of protein-nucleic acids, wherein the signal indicates a presence of the target nucleic acid in the sample and wherein absence of the signal indicates an absence of the target nucleic acid in the sample. Often, the protein-nucleic acid is an enzyme-nucleic acid or a enzyme substrate-nucleic acid. Sometimes, the protein-nucleic acid is attached to a solid support. The nucleic acid can be DNA, RNA, or a DNA/RNA hybrid. The methods described herein use a programmable nuclease, such as a DNA-activated programmable RNA nuclease, to detect a target nucleic acid. A method of assaying for a target nucleic acid in a sample, for example, comprises: a) contacting the sample to a complex comprising an engineered guide nucleic acid comprising a segment that is reverse complementary to a segment of the target nucleic acid and a programmable nuclease that exhibits sequence independent cleavage upon forming a complex comprising the segment of the engineered guide nucleic acid binding to the segment of the target nucleic acid; b) contacting the complex to a substrate; c) contacting the substrate to a reagent that differentially reacts with a cleaved substrate; and d) assaying for a signal indicating cleavage of the substrate, wherein the signal indicates a presence of the target nucleic acid in the sample and wherein absence of the signal indicates an absence of the target nucleic acid in the sample. Often, the substrate is an enzyme-nucleic acid. Sometimes, the substrate is an enzyme substrate-nucleic acid.

[0071] Cleavage of the protein-nucleic acid produces a signal. For example, cleavage of the protein-nucleic acid produces a calorimetric signal, a potentiometric signal, an amperometric signal, an optical signal, or a piezo-electric signal. Various devices can be used to detect these different types of signals, which indicate whether a target nucleic acid is present in the sample.

### Sample

[0072] A number of samples are consistent with the methods, reagents, enzymes, and kits disclosed herein. In particular, described herein are sample that contain deoxyribonucleic acid (DNA), which can be directly detected by a DNA-activated programmable RNA nuclease, such as a type VI CRISPR enzyme, for example Cas13a, Cas13b, Cas13c, Cas13d, or Cas13e. As described herein, nucleic acid comprising DNA may be directly detected using a Cas13 programmable nuclease. Direct DNA detection using Cas13 can eliminate the need for intermediate steps, for example reverse transcription or amplification, required by existing Cas13-based sequence detection methods. Elimination of said intermediate steps decreases time to assay result and reduces labor and reagent costs.

[0073] These samples can comprise a target nucleic acid. In some embodiments, the detection of the target nucleic indicates an ailment, such as a disease, cancer, or genetic disorder, or genetic information, such as for phenotyping, genotyping, or determining ancestry and are compatible with the reagents and support mediums as described herein. Generally, a sample can be taken from any place where a nucleic acid can be found. Samples can be taken from an individual/human, a non-human animal, or a crop or an environmental sample can be obtained to test for presence of a disease, virus, pathogen, cancer, genetic disorder, or any mutation or pathogen of interest. A biological sample can be blood, serum, plasma, lung fluid, exhaled breath condensate, saliva, spit, urine, stool, feces, mucus, lymph fluid, peritoneal, cerebrospinal fluid, amniotic fluid, breast milk, gastric secretions, bodily discharges, secretions from ulcers, pus, nasal secretions, sputum, pharyngeal exudates, urethral secretions/mucus, vaginal secretions/mucus, anal secretion/mucus, semen, tears, an exudate, an effusion, tissue fluid, interstitial fluid (e.g., tumor interstitial fluid), cyst fluid, tissue, or, in some instances, a combination thereof. A sample can be an aspirate of a bodily fluid from an animal (e.g. human, animals, livestock, pet, etc.) or plant. A tissue sample can be from any tissue that may be infected or affected by a pathogen (e.g., a wart, lung tissue, skin tissue, and the like). A tissue sample (e.g., from animals, plants, or humans) can be dissociated or liquified prior to application to detection system of the present disclosure. A sample can be from a plant (e.g., a crop, a hydroponically grown crop or plant, and/or house plant). Plant samples can include extracellular fluid, from tissue (e.g., root, leaves, stem, trunk etc.). A sample can be taken from the environment immediately surrounding a plant, such as hydroponic fluid/water, or soil. A sample from an environment may be from soil, air, or water. In some instances, the environmental sample is taken as a swab from a surface of interest or taken directly from the surface of interest. In some instances, the raw sample is applied to the detection system. In some instances, the sample is diluted with a buffer or a fluid or concentrated prior to application to the detection system or be applied neat to the detection system. Sometimes, the sample is contained in no more 20 μl. The sample, in some cases, is contained in no more than 1, 5, 10, 15, 20, 25, 30, 35 40, 45, 50, 55, 60, 65, 70, 75, 80, 90, 100, 200, 300, 400, 500 μl, or any of value from 1 μl to 500 μl, preferably from 10 μL to 200 μL, or more preferably from 50 μL to 100 μL. Sometimes, the sample is contained in more than 500 μl.

[0074] In some embodiments, the target nucleic acid is single-stranded DNA. The methods, reagents, enzymes, and kits disclosed herein may enable the direct detection of a DNA encoding a sequence of interest, in particular a single-stranded DNA encoding a sequence of interest, without transcribing the DNA into RNA, for example, by using an RNA polymerase. The methods, reagents, enzymes, and kits disclosed herein may enable the detection of target nucleic acid that is an amplified nucleic acid of a nucleic acid of interest. In some embodiments, the target nucleic acid is a cDNA, genomic DNA, an amplicon of genomic DNA or a DNA amplicon of an RNA. In some cases, the target nucleic acid that binds to the engineered guide nucleic acid is a portion of a nucleic acid. A portion of a nucleic acid can encode a sequence from a genomic locus. A portion of a nucleic acid can be from 5 to 100, 5 to 90, 5 to 80, 5 to 70, 5 to 60, 5 to 50, 5 to 40, 5 to 30, 5 to 25, 5 to 20, 5 to 15, or 5 to 10 nucleotides in length. A portion of a nucleic acid can be from 10 to 90, from 20 to 80, from 30 to 70, or from 40 to 60 nucleotides in length. A portion of a nucleic acid can be 5, 6, 7, 8, 9, 10, 11, 12, 13, 14, 15, 16, 17, 18, 19, 20, 21, 22, 23, 24, 25, 26, 27, 28, 29, 30, 31, 32, 33, 34, 35, 36, 37, 38, 39, 40, 45, 50, 60, 70, 80, 90, or 100 nucleotides in length. The target nucleic acid can encode a sequence is reverse complementary to an engineered guide nucleic acid sequence.

[0075] In some instances, the sample is taken from a single-cell eukaryotic organisms; a plant or a plant cell; an algal cell; a fungal cell; an animal or an animal cell, tissue, or organ; a cell, tissue, or organ from an invertebrate animal; a cell, tissue, fluid, or organ from a vertebrate animal such as fish, amphibian, reptile, bird, and mammal; a cell, tissue, fluid, or organ from a mammal such as a human, a non-human primate, an ungulate, a feline, a bovine, an ovine, and a caprine. In some instances, the sample is taken from nematodes, protozoans, helminths, or malarial parasites. In some cases, the sample comprises nucleic acids from a cell lysate from a eukaryotic cell, a mammalian cell, a human cell, a prokaryotic cell, or a plant cell. In some cases, the sample comprises nucleic acids expressed from a cell.

[0076] The sample used for disease testing may comprise at least one target nucleic acid that can bind to an engineered guide nucleic acid of the reagents described herein. The sample used for disease testing may comprise at least nucleic acid of interest that is amplified to produce a target nucleic acid that can bind to an engineered guide nucleic acid of the reagents described herein. The nucleic acid of interest can comprise DNA, RNA, or a combination thereof.

[0077] The target nucleic acid can be a nucleic acid or portion of a nucleic acid from a pathogen, virus, bacterium, fungi, protozoa, worm or other agents or organism responsible or related to a a disease or condition in living organisms (e.g. humans, animals, plants, crops and the like). The target nucleic acid can be portions of sequences that are agricultural targets (e.g., nucleic acids from plants). The target nucleic acid (e.g., a target DNA) may be a portion of a nucleic acid from a virus or a bacterium or other agents responsible for a disease in the sample. The target nucleic acid may be a portion of a nucleic acid from a gene expressed in a cancer or genetic disorder in the sample. The target nucleic acid may comprise a genetic variation (e.g., a single nucleotide polymorphism), with respect to a standard sample, associated with a disease phenotype or disease predisposition. The target nucleic acid may be an amplicon of a portion of an RNA, may be a DNA, or may be a DNA amplicon from any organism in the sample. The target nucleic acid can be a portion of any genomic sequence associated with a phenotype, trait, or disease status (e.g., eye color, a genetic disease or disorder). A target nucleic acid for determining genetic information can include, but is not limited to, a nucleic acid associated with organism ancestry (e.g., a nucleic acid comprising a single nucleotide polymorphism that identifies geographical ancestry, ancestry from an ethnic group, etc.); a nucleic acid for trait not associated with a communicable disease, cancer, or genetic disorder; a nucleic acid for a phenotypic trait (e.g., a nucleic acid from a gene for blue eyes, brown hair color, fast or slow metabolism of a drug such as caffeine, an intolerance such as lactose intolerance, etc.), or a nucleic acid for genotyping (e.g., a nucleic acid for a gene that is recessive, such as the gene for Taye-Sachs disease).

[0078] In some embodiments, target nucleic acid may comprise DNA that was reverse transcribed from RNA using a reverse transcriptase prior to detection by a DNA-activated programmable RNA nuclease (e.g., a Cas13a) using the compositions, systems, and methods disclosed herein.

[0079] In some cases, the target nucleic acid is a portion of a nucleic acid from a virus or a bacterium or other agents responsible for a disease in the sample. The target nucleic acid can be a portion of a nucleic acid associated with an infection, where the infection may be caused by a bacterium, virus, or other disease-causing agent. The target sequence, in some cases, is a portion of a nucleic acid from a sexually transmitted infection or a contagious disease, in the sample. The target sequence, in some cases, is a portion of a nucleic acid from an upper respiratory tract infection, a lower respiratory tract infection, or a contagious disease, in the sample. The target sequence, in some cases, is a portion of a nucleic acid from a hospital acquired infection or a contagious disease, in the sample. The target sequence, in some cases, is a portion of a nucleic acid from sepsis, in the sample. These diseases can include but are not limited to respiratory viruses (e.g., COVID-19, SARS, MERS, influenza and the like), human immunodeficiency virus (HIV), human papillomavirus (HPV), chlamydia, gonorrhea, syphilis, trichomoniasis, sexually transmitted infection, malaria, Dengue fever, Ebola, chikungunya, and leishmaniasis. Pathogens include viruses, fungi, helminths, protozoa, malarial parasites, Plasmodium parasites, Toxoplasma parasites, and Schistosoma parasites. Helminths include roundworms, heartworms, and phytophagous nematodes, flukes, Acanthocephala, and tapeworms. Protozoan infections include infections from Giardia spp., Trichomonas spp., African trypanosomiasis, amoebic dysentery, babesiosis, balantidial dysentery, Chaga's disease, coccidiosis, malaria and toxoplasmosis. Examples of pathogens such as parasitic/protozoan pathogens include, but are not limited to: Plasmodium falciparum, P. vivax, Trypanosoma cruzi and Toxoplasma gondii. Fungal pathogens include, but are not limited to Cryptococcus neoformans, Histoplasma capsulatum, Coccidioides immitis, Blastomyces dermatitidis, Chlamydia trachomatis, and Candida albicans. Pathogenic viruses include but are not limited to: respiratory viruses (e.g., adenoviruses, parainfluenza viruses, severe acute respiratory syndrome (SARS), coronavirus, MERS), gastrointestinal viruses (e.g., noroviruses, rotaviruses, some adenoviruses, astroviruses), exanthematous viruses (e.g. the virus that causes measles, the virus that causes rubella, the virus that causes chickenpox/shingles, the virus that causes roseola, the virus that causes smallpox, the virus that causes fifth disease, chikungunya virus infection); hepatic viral diseases (e.g., hepatitis A, B, C, D, E); cutaneous viral diseases (e.g. warts (including genital, anal), herpes (including oral, genital, anal), molluscum contagiosum); hemmorhagic viral diseases (e.g. Ebola, Lassa fever, dengue fever, yellow fever, Marburg hemorrhagic fever, Crimean-Congo hemorrhagic fever); neurologic viruses (e.g., polio, viral meningitis, viral encephalitis, rabies), sexually transmitted viruses (e.g., HIV, HPV, and the like), immunodeficiency virus (e.g., HIV); influenza virus; dengue; West Nile virus; herpes virus; yellow fever virus; Hepatitis Virus C; Hepatitis Virus A; Hepatitis Virus B; papillomavirus; and the like. Pathogens include, e.g., HIV virus, Mycobacterium tuberculosis, Streptococcus agalactiae, methicillin-resistant Staphylococcus aureus, Legionella pneumophila, Streptococcus pyogenes, Escherichia coli, Neisseria gonorrhoeae, Neisseria meningitidis, Pneumococcus, Cryptococcus neoformans, Histoplasma capsulatum, Hemophilus influenzae B, Treponema pallidum, Lyme disease spirochetes, Pseudomonas aeruginosa, Mycobacterium leprae, Brucella abortus, rabies virus, influenza virus, cytomegalovirus, herpes simplex virus I, herpes simplex virus II, human serum parvo-like virus, respiratory syncytial virus (RSV), M. genitalium, T vaginalis, varicella-zoster virus, hepatitis B virus, hepatitis C virus, measles virus, adenovirus, human T-cell leukemia viruses, Epstein-Barr virus, murine leukemia virus, mumps virus, vesicular stomatitis virus, Sindbis virus, lymphocytic choriomeningitis virus, wart virus, blue tongue virus, Sendai virus, feline leukemia virus, Reovirus, polio virus, simian virus 40, mouse mammary tumor virus, dengue virus, rubella virus, West Nile virus, Plasmodium falciparum, Plasmodium vivax, Toxoplasma gondii, Trypanosoma rangeli, Trypanosoma cruzi, Trypanosoma rhodesiense, Trypanosoma brucei, Schistosoma mansoni, Schistosoma japonicum, Babesia bovis, Eimeria tenella, Onchocerca volvulus, Leishmania tropica, Mycobacterium tuberculosis, Trichinella spiralis, Theileria parva, Taenia hydatigena, Taenia ovis, Taenia saginata, Echinococcus granulosus, Mesocestoides corti, Mycoplasma arthritidis, M. hyorhinis, M. orale, M. arginini, Acholeplasma laidlawii, M. salivarium and M. pneumoniae. In some cases, the target sequence is a portion of a nucleic acid from a genomic locus, a transcribed mRNA, or a reverse transcribed cDNA from a gene locus of bacterium or other agents responsible for a disease in the sample comprising a mutation that confers resistance to a treatment, such as a single nucleotide mutation that confers resistance to antibiotic treatment.

[0080] The sample used for cancer testing or cancer risk testing may comprise at least one target nucleic acid that can bind to an engineered guide nucleic acid of the reagents described herein. The target nucleic acid, in some cases, is comprises a portion of a gene comprising a mutation associated with cancer, a gene whose overexpression is associated with cancer, a tumor suppressor gene, an oncogene, a checkpoint inhibitor gene, a gene associated with cellular growth, a gene associated with cellular metabolism, or a gene associated with cell cycle. Sometimes, the target nucleic acid encodes a cancer biomarker, such as a prostate cancer biomarker or non-small cell lung cancer. In some cases, the assay can be used to detect “hotspots” in target nucleic acids that can be predictive of cancer, such as lung cancer, cervical cancer, in some cases, the cancer can be a cancer that is caused by a virus. Some non-limiting examples of viruses that cause cancers in humans include Epstein-Barr virus (e.g., Burkitt's lymphoma, Hodgkin's Disease, and nasopharyngeal carcinoma); papillomavirus (e.g., cervical carcinoma, anal carcinoma, oropharyngeal carcinoma, penile carcinoma); hepatitis B and C viruses (e.g., hepatocellular carcinoma); human adult T-cell leukemia virus type 1 (HTLV-1) (e.g., T-cell leukemia); and Merkel cell polyomavirus (e.g., Merkel cell carcinoma). One skilled in the art will recognize that viruses can cause or contribute to other types of cancers. In some cases, the target nucleic acid comprises a portion of a nucleic acid that is associated with a blood fever. In some cases, the target nucleic acid is a portion of a nucleic acid from a genomic locus, any DNA amplicon of, a reverse transcribed mRNA, or a cDNA from a locus of at least one of: ALK, APC, ATM, AXIN2, BAP1, BARD1, BLM, BMPR1A, BRCA1, BRCA2, BRIP1, CASR, CDC73, CDH1, CDK4, CDKN1B, CDKN1C, CDKN2A, CEBPA, CHEK2, CTNNA1, DICERI, DIS3L2, EGFR, EPCAM, FH, FLCN, GATA2, GPC3, GREM1, HOXB13, HRAS, KIT, MAX, MEN1, MET, MITF, MLH1, MSH2, MSH3, MSH6, MUTYH, NBN, NF1, NF2, NTHL1, PALB2, PDGFRA, PHOX2B, PMS2, POLD1, POLE, POT1, PRKAR1A, PTCH1, PTEN, RAD50, RAD51C, RAD51D, RB1, RECQL4, RET, RUNX1, SDHA, SDHAF2, SDHB, SDHC, SDHD, SMAD4, SMARCA4, SMARCB1, SMARCEl, STK11, SUFU, TERC, TERT, TMEM127, TP53, TSC1, TSC2, VHL, WRN, and WT1.

[0081] The sample used for genetic disorder testing may comprise at least one target nucleic acid that can bind to an engineered guide nucleic acid of the reagents described herein. In some embodiments, the genetic disorder is hemophilia, sickle cell anemia, β-thalassemia, Duchene muscular dystrophy, severe combined immunodeficiency, Huntington's disease, or cystic fibrosis. The target nucleic acid, in some cases, is from a gene with a mutation associated with a genetic disorder, from a gene whose overexpression is associated with a genetic disorder, from a gene associated with abnormal cellular growth resulting in a genetic disorder, or from a gene associated with abnormal cellular metabolism resulting in a genetic disorder. In some cases, the target nucleic acid is a nucleic acid from a genomic locus, reverse transcribed mRNA, a DNA amplicon of or a cDNA from a locus of at least one of: CFTR, FMR1, SMN1, ABCB11, ABCC8, ABCD1, ACAD9, ACADM, ACADVL, ACAT1, ACOX1, ACSF3, ADA, ADAMTS2, ADGRG1, AGA, AGL, AGPS, AGXT, AIRE, ALDH3A2, ALDOB, ALG6, ALMS1, ALPL, AMT, AQP2, ARG1, ARSA, ARSB, ASL, ASNS, ASPA, ASS1, ATM, ATP6V1B1, ATP7A, ATP7B, ATRX, BBS1, BBS10, BBS12, BBS2, BCKDHA, BCKDHB, BCS1L, BLM, BSND, CAPN3, CBS, CDH23, CEP290, CERKL, CHM, CHRNE, CIITA, CLN3, CLN5, CLN6, CLN8, CLRN1, CNGB3, COL27A1, COL4A3, COL4A4, COL4A5, COL7A1, CPS1, CPT1A, CPT2, CRB1, CTNS, CTSK, CYBA, CYBB, CYP11B1, CYP11B2, CYP17A1, CYP19A1, CYP27A1, DBT, DCLRElC, DHCR7, DHDDS, DLD, DMD, DNAH5, DNAI1, DNAI2, DYSF, EDA, EIF2B5, EMD, ERCC6, ERCC8, ESCO2, ETFA, ETFDH, ETHEl, EVC, EVC2, EYS, F9, FAH, FAM161A, FANCA, FANCC, FANCG, FH, FKRP, FKTN, G6PC, GAA, GALC, GALK1, GALT, GAMT, GBA, GBE1, GCDH, GFM1, GJB1, GJB2, GLA, GLB1, GLDC, GLE1, GNE, GNPTAB, GNPTG, GNS, GRHPR, HADHA, HAX1, HBA1, HBA2, HBB, HEXA, HEXB, HGSNAT, HLCS, HMGCL, HOGA1, HPS1, HPS3, HSD17B4, HSD3B2, HYAL1, HYLSl, IDS, IDUA, IKBKAP, IL2RG, IVD, KCNJ11, LAMA2, LAMA3, LAMB3, LAMC2, LCA5, LDLR, LDLRAP1, LHX3, LIFR, LIPA, LOXHD1, LPL, LRPPRC, MAN2B1, MCOLN1, MED17, MESP2, MFSD8, MKS1, MLC1, MMAA, MMAB, MMACHC, MMADHC, MPI, MPL, MPV17, MTHFR, MTM1, MTRR, MTTP, MUT, MYO7A, NAGLU, NAGS, NBN, NDRG1, NDUFAF5, NDUFS6, NEB, NPC1, NPC2, NPHS1, NPHS2, NR2E3, NTRK1, OAT, OPA3, OTC, PAH, PC, PCCA, PCCB, PCDH15, PDHA1, PDHB, PEX1, PEX10, PEX12, PEX2, PEX6, PEX7, PFKM, PHGDH, PKHD1, PMM2, POMGNT1, PPT1, PROP1, PRPS1, PSAP, PTS, PUS1, PYGM, RAB23, RAG2, RAPSN, RARS2, RDH12, RMRP, RPE65, RPGRIP1L, RS1, RTEL1, SACS, SAMHDI, SEPSECS, SGCA, SGCB, SGCG, SGSH, SLC12A3, SLC12A6, SLC17A5, SLC22A5, SLC25A13, SLC25A15, SLC26A2, SLC26A4, SLC35A3, SLC37A4, SLC39A4, SLC4A11, SLC6A8, SLC7A7, SMARCAL1, SMPD1, STAR, SUMF1, TAT, TCIRG1, TECPR2, TFR2, TGM1, TH, TMEM216, TPP1, TRMU, TSFM, TTPA, TYMP, USH1C, USH2A, VPS13A, VPS13B, VPS45, VRK1, VSX2, WNT10A, XPA, XPC, and ZFYVE26.

[0082] In some embodiments, the target nucleic acid sequence comprises a nucleic acid sequence of a virus, a bacterium, or other pathogen responsible for a disease in a plant (e.g., a crop). Methods and compositions of the disclosure can be used to treat or detect a disease in a plant. For example, the methods of the disclosure can be used to target a viral nucleic acid sequence in a plant. A programmable nuclease of the disclosure can cleave the viral nucleic acid. In some embodiments, the target nucleic acid sequence comprises a nucleic acid sequence of a virus or a bacterium or other agents (e.g., any pathogen) responsible for a disease in the plant (e.g., a crop). In some embodiments, the target nucleic acid comprises DNA that is reverse transcribed from RNA using a reverse transcriptase prior to detection by a programmable nuclease using the compositions, systems, and methods disclosed herein. The target nucleic acid, in some cases, is a portion of a nucleic acid from a virus or a bacterium or other agents responsible for a disease in the plant (e.g., a crop). In some cases, the target nucleic acid is a portion of a nucleic acid from a genomic locus, or any DNA amplicon, such as a reverse transcribed mRNA or a cDNA from a gene locus, a transcribed mRNA, or a reverse transcribed cDNA from a gene locus in at a virus or a bacterium or other agents (e.g., any pathogen) responsible for a disease in the plant (e.g., a crop). A virus infecting the plant can be an RNA virus. A virus infecting the plant can be a DNA virus. Non-limiting examples of viruses that can be targeted with the disclosure include Tobacco mosaic virus (TMV), Tomato spotted wilt virus (TSWV), Cucumber mosaic virus (CMV), Potato virus Y (PVY), Cauliflower mosaic virus (CaMV) (RT virus), Plum pox virus (PPV), Brome mosaic virus (BMV) and Potato virus X (PVX).

[0083] The plant can be a monocotyledonous plant. The plant can be a dicotyledonous plant. Non-limiting examples of orders of dicotyledonous plants include Magniolales, Illiciales, Laurales, Piperales, Aristochiales, Nymphaeales, Ranunculales, Papeverales, Sarraceniaceae, Trochodendrales, Hamamelidales, Eucomiales, Leitneriales, Myricales, Fagales, Casuarinales, Caryophyllales, Batales, Polygonales, Plumbaginales, Dilleniales, Theales, Malvales, Urticales, Lecythidales, Violales, Salicales, Capparales, Ericales, Diapensales, Ebenales, Primulales, Rosales, Fabales, Podostemales, Haloragales, Myrtales, Cornales, Proteales, San tales, Rafflesiales, Celastrales, Euphorbiales, Rhamnales, Sapindales, Juglandales, Geraniales, Polygalales, Umbellales, Gentianales, Polemoniales, Lamiales, Plantaginales, Scrophulariales, Campanulales, Rubiales, Dipsacales, and Asterales.

[0084] Non-limiting examples of orders of monocotyledonous plants include Alismatales, Hydrocharitales, Najadales, Triuridales, Commelinales, Eriocaulales, Restionales, Poales, Juncales, Cyperales, Typhales, Bromeliales, Zingiberales, Arecales, Cyclanthales, Pandanales, Arales, Lilliales, and Orchid ales. A plant can belong to the order, for example, Gymnospermae, Pinales, Ginkgoales, Cycadales, Araucariales, Cupressales and Gnetales.

[0085] Non-limiting examples of plants include plant crops, fruits, vegetables, grains, soy bean, corn, maize, wheat, seeds, tomatoes, rice, cassava, sugarcane, pumpkin, hay, potatoes, cotton, cannabis, tobacco, flowering plants, conifers, gymnosperms, ferns, clubmosses, hornworts, liverworts, mosses, wheat, maize, rice, millet, barley, tomato, apple, pear, strawberry, orange, acacia, carrot, potato, sugar beets, yam, lettuce, spinach, sunflower, rape seed, Arabidopsis, alfalfa, amaranth, apple, apricot, artichoke, ash tree, asparagus, avocado, banana, barley, beans, beet, birch, beech, blackberry, blueberry, broccoli, Brussel's sprouts, cabbage, canola, cantaloupe, carrot, cassava, cauliflower, cedar, a cereal, celery, chestnut, cherry, Chinese cabbage, citrus, clementine, clover, coffee, corn, cotton, cowpea, cucumber, cypress, eggplant, elm, endive, eucalyptus, fennel, figs, fir, geranium, grape, grapefruit, groundnuts, ground cherry, gum hemlock, hickory, kale, kiwifruit, kohlrabi, larch, lettuce, leek, lemon, lime, locust, pine, maidenhair, maize, mango, maple, melon, millet, mushroom, mustard, nuts, oak, oats, oil palm, okra, onion, orange, an ornamental plant or flower or tree, papaya, palm, parsley, parsnip, pea, peach, peanut, pear, peat, pepper, persimmon, pigeon pea, pine, pineapple, plantain, plum, pomegranate, potato, pumpkin, radicchio, radish, rapeseed, raspberry, rice, rye, sorghum, safflower, sallow, soybean, spinach, spruce, squash, strawberry, sugar beet, sugarcane, sunflower, sweet potato, sweet corn, tangerine, tea, tobacco, tomato, trees, triticale, turf grasses, turnips, vine, walnut, watercress, watermelon, wheat, yams, yew, and zucchini. A plant can include algae.

[0086] The sample used for phenotyping testing may comprise at least one target nucleic acid that can bind to an engineered guide nucleic acid of the reagents described herein. The target nucleic acid, in some cases, is a portion of a nucleic acid encoding a sequence associated with a phenotypic trait.

[0087] The sample used for genotyping testing may comprise at least one target nucleic acid that can bind to an engineer guide nucleic acid of the reagents described herein. The target nucleic acid, in some cases, is a portion of a nucleic acid encoding a sequence associated with a genotype of interest.

[0088] The sample used for ancestral testing may comprise at least one target nucleic acid that can bind to an engineer guide nucleic acid of the reagents described herein. The target nucleic acid, in some cases, is a portion of a nucleic acid encoding a sequence associated with a geographic region of origin or ethnic group.

[0089] The sample can be used for identifying a disease status. For example, a sample is any sample described herein, and is obtained from a subject for use in identifying a disease status of a subject. The disease can be a cancer or genetic disorder. Sometimes, a method comprises obtaining a serum sample from a subject; and identifying a disease status of the subject. Often, the disease status is prostate disease status.

[0090] In some instances, the target nucleic acid is a single stranded nucleic acid. Alternatively or in combination, the target nucleic acid is a double stranded nucleic acid and is prepared into single stranded nucleic acids before or upon contacting the reagents. The target nucleic acid may be a reverse transcribed RNA, DNA, DNA amplicon, synthetic nucleic acids, or nucleic acids found in biological or environmental samples. Preferably, the target nucleic acid is single-stranded DNA (ssDNA). In some cases, the target nucleic acid is from a virus, a parasite, or a bacterium described herein. In some cases, the target nucleic acid is transcribed from a gene as described herein and then reverse transcribed into a DNA amplicon.

[0091] A number of target nucleic acids are consistent with the methods and compositions disclosed herein. Some methods described herein can detect a target nucleic acid present in the sample in various concentrations or amounts as a target nucleic acid population. In some cases, the sample has at least 2 target nucleic acids. In some cases, the sample has at least 3, 5, 10, 20, 30, 40, 50, 100, 200, 300, 400, 500, 600, 700, 800, 900, 1000, 2000, 3000, 4000, 5000, 6000, 7000, 8000, 9000, or 10000 target nucleic acids. In some cases, the sample as from 1 to 10,000, from 100 to 8000, from 400 to 6000, from 500 to 5000, from 1000 to 4000, or from 2000 to 3000 target nucleic acids. In some cases, the method detects target nucleic acid present at least at one copy per 10¹ non-target nucleic acids, 10² non-target nucleic acids, 10′ non-target nucleic acids, 104 non-target nucleic acids, 10⁵ non-target nucleic acids, 10⁶ non-target nucleic acids, 10⁷ non-target nucleic acids, 10⁸ non-target nucleic acids, 10⁹ non-target nucleic acids, or 10¹⁰ non-target nucleic acids.

[0092] In some embodiments, the sample comprises a target nucleic acid at a concentration of less than 1 nM, less than 2 nM, less than 3 nM, less than 4 nM, less than 5 nM, less than 6 nM, less than 7 nM, less than 8 nM, less than 9 nM, less than 10 nM, less than 20 nM, less than 30 nM, less than 40 nM, less than 50 nM, less than 60 nM, less than 70 nM, less than 80 nM, less than 90 nM, less than 100 nM, less than 200 nM, less than 300 nM, less than 400 nM, less than 500 nM, less than 600 nM, less than 700 nM, less than 800 nM, less than 900 nM, less than 1 μM, less than 2 μM, less than 3 μM, less than 4 μM, less than 5 μM, less than 6 μM, less than 7 μM, less than 8 μM, less than 9 μM, less than 10 μM, less than 100 μM, or less than 1 mM. In some embodiments, the sample comprises a target nucleic acid sequence at a concentration of from 1 nM to 2 nM, from 2 nM to 3 nM, from 3 nM to 4 nM, from 4 nM to 5 nM, from 5 nM to 6 nM, from 6 nM to 7 nM, from 7 nM to 8 nM, from 8 nM to 9 nM, from 9 nM to 10 nM, from 10 nM to 20 nM, from 20 nM to 30 nM, from 30 nM to 40 nM, from 40 nM to 50 nM, from 50 nM to 60 nM, from 60 nM to 70 nM, from 70 nM to 80 nM, from 80 nM to 90 nM, from 90 nM to 100 nM, from 100 nM to 200 nM, from 200 nM to 300 nM, from 300 nM to 400 nM, from 400 nM to 500 nM, from 500 nM to 600 nM, from 600 nM to 700 nM, from 700 nM to 800 nM, from 800 nM to 900 nM, from 900 nM to 1 μM, from 1 μM to 2 μM, from 2 μM to 3 μM, from 3 μM to 4 μM, from 4 μM to 5 μM, from 5 μM to 6 μM, from 6 μM to 7 μM, from 7 μM to 8 μM, from 8 μM to 9 μM, from 9 μM to 10 μM, from 10 μM to 100 μM, from 100 μM to 1 mM, from 1 nM to 10 nM, from 1 nM to 100 nM, from 1 nM to 1 μM, from 1 nM to 10 μM, from 1 nM to 100 μM, from 1 nM to 1 mM, from 10 nM to 100 nM, from 10 nM to 1 μM, from 10 nM to 10 μM, from 10 nM to 100 μM, from 10 nM to 1 mM, from 100 nM to 1 μM, from 100 nM to 10 μM, from 100 nM to 100 μM, from 100 nM to 1 mM, from 1 μM to 10 μM, from 1 μM to 100 μM, from 1 μM to 1 mM, from 10 μM to 100 μM, from 10 μM to 1 mM, or from 100 μM to 1 mM. In some embodiments, the sample comprises a target nucleic acid at a concentration of from 20 nM to 200 μM, from 50 nM to 100 μM, from 200 nM to 50 μM, from 500 nM to 20 μM, or from 2 μM to 10 μM. In some embodiments, the target nucleic acid is not present in the sample.

[0093] In some embodiments, the sample comprises fewer than 10 copies, fewer than 100 copies, fewer than 1000 copies, fewer than 10,000 copies, fewer than 100,000 copies, or fewer than 1,000,000 copies of a target nucleic acid sequence. In some embodiments, the sample comprises from 10 copies to 100 copies, from 100 copies to 1000 copies, from 1000 copies to 10,000 copies, from 10,000 copies to 100,000 copies, from 100,000 copies to 1,000,000 copies, from 10 copies to 1000 copies, from 10 copies to 10,000 copies, from 10 copies to 100,000 copies, from 10 copies to 1,000,000 copies, from 100 copies to 10,000 copies, from 100 copies to 100,000 copies, from 100 copies to 1,000,000 copies, from 1,000 copies to 100,000 copies, or from 1,000 copies to 1,000,000 copies of a target nucleic acid sequence. In some embodiments, the sample comprises from 10 copies to 500,000 copies, from 200 copies to 200,000 copies, from 500 copies to 100,000 copies, from 1000 copies to 50,000 copies, from 2000 copies to 20,000 copies, from 3000 copies to 10,000 copies, or from 4000 copies to 8000 copies. In some embodiments, the target nucleic acid is not present in the sample.

[0094] A number of target nucleic acid populations are consistent with the methods and compositions disclosed herein. Some methods described herein can detect two or more target nucleic acid populations present in the sample in various concentrations or amounts. In some cases, the sample has at least 2 target nucleic acid populations. In some cases, the sample has at least 3, 4, 5, 6, 7, 8, 9, 10, 20, 30, 40, or 50 target nucleic acid populations. In some cases, the sample has from 3 to 50, from 5 to 40, or from 10 to 25 target nucleic acid populations. In some cases, the method detects target nucleic acid populations that are present at least at one copy per 10¹ non-target nucleic acids, 10² non-target nucleic acids, 10′ non-target nucleic acids, 104 non-target nucleic acids, 10⁵ non-target nucleic acids, 10⁶ non-target nucleic acids, 10⁷ non-target nucleic acids, 10⁸ non-target nucleic acids, 10⁹ non-target nucleic acids, or 10¹⁰ non-target nucleic acids. The target nucleic acid populations can be present at different concentrations or amounts in the sample.

[0095] Additionally, target nucleic acid can be an amplified nucleic acid of interest, which can bind to the engineered guide nucleic acid of a programmable nuclease, such as a DNA-activated programmable RNA nuclease. The nucleic acid of interest may be any nucleic acid disclosed herein or from any sample as disclosed herein. This amplification can be thermal amplification (e.g., using PCR) or isothermal amplification. This nucleic acid amplification of the sample can improve at least one of sensitivity, specificity, or accuracy of the detection the target nucleic acid. The reagents for nucleic acid amplification can comprise a recombinase, a oligonucleotide primer, a single-stranded DNA binding (SSB) protein, and a polymerase. The nucleic acid amplification can be transcription mediated amplification (TMA). Nucleic acid amplification can be helicase dependent amplification (HDA) or circular helicase dependent amplification (cHDA). In additional cases, nucleic acid amplification is strand displacement amplification (SDA). The nucleic acid amplification can be recombinase polymerase amplification (RPA). The nucleic acid amplification can be at least one of loop mediated amplification (LAMP) or the exponential amplification reaction (EXPAR). Nucleic acid amplification is, in some cases, by rolling circle amplification (RCA), ligase chain reaction (LCR), simple method amplifying RNA targets (SMART), single primer isothermal amplification (SPIA), multiple displacement amplification (MDA), nucleic acid sequence based amplification (NASBA), hinge-initiated primer-dependent amplification of nucleic acids (HIP), nicking enzyme amplification reaction (NEAR), or improved multiple displacement amplification (IMDA). The nucleic acid amplification can be performed for no greater than 1, 2, 3, 4, 5, 6, 7, 8, 9, 10, 11, 12, 13, 14, 15, 16, 17, 18, 19, 20, 25, 30, 40, 50, or 60 minutes. Sometimes, the nucleic acid amplification reaction is performed at a temperature of around 20-45° C. The nucleic acid amplification reaction can be performed at a temperature no greater than 20° C., 25° C., 30° C., 35° C., 37° C., 40° C., 45° C. The nucleic acid amplification reaction can be performed at a temperature of at least 20° C., 25° C., 30° C., 35° C., 37° C., 40° C., or 45° C.

[0096] In some embodiments, the target nucleic acid as disclosed herein can be activate the programmable nuclease to initiate trans cleavage of a nucleic acid-based reporter (e.g., a reporter, such as an RNA reporter or DNA reporter). For example, a DNA-activated programmable RNA nuclease herein is activated by a target DNA nucleic acid to cleave RNA reporter molecules. For example, a DNA-activated programmable DNA nuclease disclosed herein is activated by a target DNA nucleic acid to cleave DNA reporter molecules. The RNA reporter can comprise a single-stranded RNA labelled with a reporter or can be any RNA-based reporter as disclosed herein. The DNA reporter can comprise a single-stranded DNA labelled with a reporter or can be any DNA-based reporter as disclosed herein. In some embodiments, a Cas13a recognizes and detects a target single-stranded DNA and, further, trans-cleaves RNA reporters.

[0097] Any of the above disclosed samples are consistent with the methods, compositions, reagents, enzymes, and kits disclosed herein and can be used as a companion diagnostic with any of the diseases disclosed herein (e.g., RSV, sepsis, flu), or can be used in reagent kits, point-of-care diagnostics, or over-the-counter diagnostics.

### Reagents

[0098] A number of reagents are consistent with the methods, compositions, reagents, enzymes, and kits disclosed herein. The reagents described herein for detecting a disease, cancer, or genetic disorder comprise an engineered guide nucleic acid targeting the target nucleic acid segment indicative of a disease, cancer, or genetic disorder. The reagents disclosed herein may include programmable nucleases, engineered guide nucleic acids, target nucleic acids, and buffers. As described herein, target nucleic acid comprising DNA may be directly detected (e.g., the target DNA hybridizes to the guide nucleic) using a DNA-activated programmable RNA nuclease (e.g., a Cas13a) and other reagents disclosed herein. Direct DNA detection using Cas13 may eliminate the need for intermediate steps, for example reverse transcription or amplification, required by existing programmable nuclease-based sequence detection methods. Elimination of said intermediate steps decreases time to assay result and reduces labor and reagent costs. As described herein, target nucleic acid comprising DNA may be an amplicon of a nucleic acid of interest and the amplicon can be detected (e.g., the target DNA hybridizes to the guide nucleic) using a DNA-activated programmable RNA nuclease (e.g., a Cas13a) and other reagents disclosed herein. Additionally, detection by a DNA-activated programmable RNA nuclease, which can cleave RNA reporters, allows for multiplexing with DNA programmable DNA nuclease that can cleave DNA reporters (e.g., Type V programmable nucleases).

### Guide Nucleic Acids

[0099] The reagents of this disclosure may comprise a guide nucleic acid. The guide nucleic acid is an engineered guide nucleic acid. Engineered guide nucleic acids are non-naturally occurring and can be synthetically made. Engineered guide nucleic acids can be encoded for using vectors or can be chemically synthesized. The engineered guide nucleic acid can bind to a single stranded target nucleic acid or portion thereof as described herein. For example, the engineered guide nucleic acid can bind to a target nucleic acid such as nucleic acid from a virus or a bacterium or other agents responsible for a disease, or an amplicon thereof, as described herein. The engineered guide nucleic acid can bind to a target nucleic acid such as a nucleic acid from a bacterium, a virus, a parasite, a protozoa, a fungus or other agents responsible for a disease, or an amplicon thereof, as described herein and further comprising a mutation, such as a single nucleotide polymorphism (SNP), which can confer resistance to a treatment, such as antibiotic treatment. The engineered guide nucleic acid can bind to a target nucleic acid such as a nucleic acid, preferably DNA, from a cancer gene or gene associated with a genetic disorder, or an amplicon thereof, as described herein. The engineered guide nucleic acid comprises a segment of nucleic acids that are reverse complementary to the target nucleic acid. Often the engineered guide nucleic acid binds specifically to the target nucleic acid. The target nucleic acid may be a reversed transcribed RNA, DNA, DNA amplicon, or synthetic nucleic acids. The target nucleic acid can be a single-stranded DNA or DNA amplicon of a nucleic acid of interest.

[0100] An engineered guide nucleic acid can comprise a sequence that is reverse complementary to the sequence of a target nucleic acid. An engineered guide nucleic acid can include a crRNA. Sometimes, an engineered guide nucleic acid comprises a crRNA and tracrRNA. The crRNA can have a spacer sequence that is reverse complementary or sufficiently reverse complementary to allow for hybridization to a target nucleic acid. The engineered guide nucleic acid can bind specifically to the target nucleic acid. In some cases, the engineered guide nucleic acid is not naturally occurring and made by artificial combination of otherwise separate segments of sequence. Often, the artificial combination is performed by chemical synthesis, by genetic engineering techniques, or by the artificial manipulation of isolated segments of nucleic acids. In some cases, the segment of an engineered guide nucleic acid that comprises a sequence that is reverse complementary to the target nucleic acid is 20 nucleotides in length. The segment of the engineered guide nucleic acid that comprises a sequence that is reverse complementary to the target nucleic acid may have a length of at least 10, 11, 12, 13, 14, 15, 16, 17, 18, 19, 20, 21, 22, 23, 24, 25, 26, 27, 28, 29, or 30 nucleotides in length. In some instances, the segment of the engineered guide nucleic acid that comprises a sequence that is reverse complementary to the target nucleic acid is 10, 11, 12, 13, 14, 15, 16, 17, 18, 19, 20, 21, 22, 23, 24, 25, 26, 27, 28, 29, or 30 nucleotides in length. In some cases, the segment of an engineered guide nucleic acid that comprises a sequence that is reverse complementary to the target nucleic acid has a length from exactly or about 12 nucleotides (nt) to about 80 nt, from about 12 nt to about 50 nt, from about 12 nt to about 45 nt, from about 12 nt to about 40 nt, from about 12 nt to about 35 nt, from about 12 nt to about 30 nt, from about 12 nt to about 25 nt, from about 12 nt to about 20 nt, from about 12 nt to about 19 nt, from about 19 nt to about 20 nt, from about 19 nt to about 25 nt, from about 19 nt to about 30 nt, from about 19 nt to about 35 nt, from about 19 nt to about 40 nt, from about 19 nt to about 45 nt, from about 19 nt to about 50 nt, from about 19 nt to about 60 nt, from about 20 nt to about 25 nt, from about 20 nt to about 30 nt, from about 20 nt to about 35 nt, from about 20 nt to about 40 nt, from about 20 nt to about 45 nt, from about 20 nt to about 50 nt, or from about 20 nt to about 60 nt. In some cases, the segment of an engineered guide nucleic acid that comprises a sequence that is reverse complementary to the target nucleic acid has a length of from about 10 nt to about 60 nt, from about 20 nt to about 50 nt, or from about 30 nt to about 40 nt. It is understood that the sequence of a polynucleotide need not be 100% complementary to that of its target nucleic acid to be specifically hybridizable or hybridizable or bind specifically. The engineered guide nucleic acid can have a sequence comprising at least one uracil in a region from nucleic acid residue 5 to 20 that is reverse complementary to a modification variable region in the target nucleic acid. The engineered guide nucleic acid, in some cases, has a sequence comprising at least one uracil in a region from nucleic acid residue 5 to 9, 10 to 14, or 15 to 20 that is reverse complementary to a modification variable region in the target nucleic acid. The engineered guide nucleic acid can have a sequence comprising at least one uracil in a region from nucleic acid residue 5 to 20 that is reverse complementary to a methylation variable region in the target nucleic acid. The engineered guide nucleic acid, in some cases, has a sequence comprising at least one uracil in a region from nucleic acid residue 5 to 9, 10 to 14, or 15 to 20 that is reverse complementary to a methylation variable region in the target nucleic acid. The engineered guide nucleic acid can hybridize with a target nucleic acid.

[0101] The engineered guide nucleic acid can be selected from a group of engineered guide nucleic acids that have been tiled against the nucleic acid sequence of a strain of an infection or genomic locus of interest. The engineered guide nucleic acid can be selected from a group of engineered guide nucleic acids that have been tiled against the nucleic acid sequence of a strain of HPV 16 or HPV18. Often, engineered guide nucleic acids that are tiled against the nucleic acid of a strain of an infection or genomic locus of interest can be pooled for use in a method described herein. Often, these engineered guide nucleic acids are pooled for detecting a target nucleic acid in a single assay. The pooling of engineered guide nucleic acids that are tiled against a single target nucleic acid can enhance the detection of the target nucleic using the methods described herein. The pooling of engineered guide nucleic acids that are tiled against a single target nucleic acid can ensure broad coverage of the target nucleic acid within a single reaction using the methods described herein. The tiling, for example, is sequential along the target nucleic acid. Sometimes, the tiling is overlapping along the target nucleic acid. In some instances, the tiling comprises gaps between the tiled engineered guide nucleic acids along the target nucleic acid. In some instances the tiling of the engineered guide nucleic acids is non-sequential. Often, a method for detecting a target nucleic acid comprises contacting a target nucleic acid to a pool of engineered guide nucleic acids and a programmable nuclease, wherein an engineered guide nucleic acid sequence of the pool of engineered guide nucleic acids has a sequence selected from a group of tiled engineered guide nucleic acid that correspond to nucleic acid sequence of a target nucleic acid; and assaying for a signal produce by cleavage of at least some detector nucleic acids of a population of detector nucleic acids. Pooling of engineered guide nucleic acids can ensure broad spectrum identification, or broad coverage, of a target species within a single reaction. This can be particularly helpful in diseases or indications, like sepsis, that may be caused by multiple organisms.

### Programmable Nucleases

[0102] The programmable nucleases disclosed herein (e.g., a DNA-activated programmable RNA nuclease such as a type VI CRISPR enzyme) enable the detection of target nucleic acids (e.g., DNA). Additionally, detection by a DNA-activated programmable RNA nuclease, which can cleave RNA reporters, allows for multiplexing with other programmable nucleases, such as a a DNA-activated programmable DNA nuclease (e.g., a Type V CRISPR enzyme).

[0103] In some embodiments, the Type VI CRISPR/Cas enzyme is a Cas13 nuclease. The general architecture of a Cas13 protein includes an N-terminal domain and two HEPN (higher eukaryotes and prokaryotes nucleotide-binding) domains separated by two helical domains (Liu et al., Cell 2017 Jan. 12;168(1-2):121-134.e12). The HEPN domains each comprise aR-X₄-H motif Shared features across Cas13 proteins include that upon binding of the crRNA of the engineered guide nucleic acid to a target nucleic acid, the protein undergoes a conformational change to bring together the HEPN domains and form a catalytically active RNase. (Tambe et al., Cell Rep. 2018 Jul. 24; 24(4): 1025-1036.). Thus, two activatable HEPN domains are characteristic of a Cas13 nuclease of the present disclosure. However, Cas13 nucleases also consistent with the present disclosure include Cas13 nucleases comprising mutations in the HEPN domain that enhance the Cas13 proteins cleavage efficiency or mutations that catalytically inactivate the HEPN domains. Cas13 nucleases consistent with the present disclosure also Cas13 nucleases comprising catalytic

[0104] A Cas13 nuclease can be a Cas13a protein (also referred to as “c2c2”), a Cas13b protein, a Cas13c protein, a Cas13d protein, or a Cas13e protein. Example C2c2 proteins are set forth as SEQ ID NO: 18-SEQ ID NO: 35. In some cases, a subject C2c2 protein includes an amino acid sequence having 80% r more (e.g., 85% r more, 90% r more, 95% r more, 98% r more, 99% r more, 99.5% r more, or 100%) amino acid sequence identity with the amino acid sequence set forth in any one of SEQ ID NO: 18-SEQ ID NO: 35. In some cases, a suitable C2c2 polypeptide comprises an amino acid sequence having at least 80%, at least 85%, at least 90%, at least 95%, at least 98%, at least 99%, or 100%, amino acid sequence identity to the Listeria seeligeri C2c2 amino acid sequence set forth in SEQ ID NO: 18. In some cases, a suitable C2c2 polypeptide comprises an amino acid sequence having at least 80%, at least 85%, at least 90%, at least 95%, at least 98%, at least 99%, or 100%, amino acid sequence identity to the Leptotrichia buccalis C2c2 amino acid sequence set forth in SEQ ID NO: 19. In some cases, a suitable C2c2 polypeptide comprises an amino acid sequence having at least 80%, at least 85%, at least 90%, at least 95%, at least 98%, at least 99%, or 100%, amino acid sequence identity to the Rhodobacter capsulatus C2c2 amino acid sequence set forth in SEQ ID NO: 21. In some cases, a suitable C2c2 polypeptide comprises an amino acid sequence having at least 80%, at least 85%, at least 90%, at least 95%, at least 98%, at least 99%, or 100%, amino acid sequence identity to the Carnobacterium gallinarum C2c2 amino acid sequence set forth in SEQ ID NO: 22. In some cases, a suitable C2c2 polypeptide comprises an amino acid sequence having at least 80%, at least 85%, at least 90%, at least 95%, at least 98%, at least 99%, or 100%, amino acid sequence identity to the Herbinix hemicellulosilytica C2c2 amino acid sequence set forth in SEQ ID NO: 23. In some cases, the C2c2 protein includes an amino acid sequence having 80% r more amino acid sequence identity with the Leptotrichia buccalis (Lbu) C2c2 amino acid sequence set forth in SEQ ID NO: 19. In some cases, the C2c2 protein is a Leptotrichia buccalis (Lbu) C2c2 protein (e.g., see SEQ ID NO: 19). In some cases, the C2c2 protein includes the amino acid sequence set forth in any one of SEQ ID NO: 18-SEQ ID NO: 35. In some cases, a C2c2 protein used in a method of the present disclosure is not a C2c2 polypeptide having at least 80%, at least 85%, at least 90%, at least 95%, at least 98%, at least 99%, or 100%, amino acid sequence identity to the Lsh C2c2 polypeptide set forth in SEQ ID NO: 20. Exemplary Cas13 protein sequences are set forth in SEQ ID NO: 18-SEQ ID NO: 35. TABLE 1, below, shows exemplary Cas13 DNA-activated programmable nuclease sequences of the present disclsorue.

TABLE 1
Cas 13 Protein Sequences

| SEQ ID NO | Description | Sequence |
|---|---|---|
| SEQ ID NO: 18 | Listeria | MWISIKTLIHHLGVLFFCDYMYNRREKKIIEVKTMRITKVE |
| | seeligeri C2c2 | VDRKKVLISRDKNGGKLVYENEMQDNTEQIMHHKKSSFY |
| | amino acid | KSVVNKTICRPEQKQMKKLVHGLLQENSQEKIKVSDVTKL |
| | sequence | NISNFLNHRFKKSLYYFPENSPDKSEEYRIEINLSQLLEDSL |
| | | KKQQGTFICWESFSKDMELYINWAENYISSKTKLIKKSIRN |
| | | NRIQSTESRSGQLMDRYMKDILNKNKPFDIQSVSEKYQLE |
| | | KLTSALKATFKEAKKNDKEINYKLKSTLQNHERQIIEELKE |
| | | NSELNQFNIEIRKHLETYFPIKKTNRKVGDIRNLEIGEIQKIV |
| | | NHRLKNKIVQRILQEGKLASYEIESTVNSNSLQKIKIEEAFA |
| | | LKFINACLFASNNLRNMVYPVCKKDILMIGEFKNSFKEIKH |
| | | KKFIRQWSQFFSQEITVDDIELASWGLRGAIAPIRNEIIHLK |
| | | KHSWKKFFNNPTFKVKKSKIINGKTKDVTSEFLYKETLFK |
| | | DYFYSELDSVPELIINKMESSKILDYYSSDQLNQVFTIPNFE |
| | | LSLLTSAVPFAPSFKRVYLKGFDYQNQDEAQPDYNLKLNI |
| | | YNEKAFNSEAFQAQYSLFKMVYYQVFLPQFTTNNDLFKSS |
| | | VDFILTLNKERKGYAKAFQDIRKMNKDEKPSEYMSYIQSQ |
| | | LMLYQKKQEEKEKINHFEKFINQVFIKGFNSFIEKNRLTYIC |
| | | HPTKNTVPENDNIEIPFHTDMDDSNIAFWLMCKLLDAKQL |
| | | SELRNEMIKFSCSLQSTEEISTFTKAREVIGLALLNGEKGCN |
| | | DWKELFDDKEAWKKNMSLYVSEELLQSLPYTQEDGQTPV |
| | | INRSIDLVKKYGTETILEKLFSSSDDYKVSAKDIAKLHEYD |
| | | VTEKIAQQESLHKQWIEKPGLARDSAWTKKYQNVINDISN |
| | | YQWAKTKVELTQVRHLHQLTIDLLSRLAGYMSIADRDFQF |
| | | SSNYILERENSEYRVTSWILLSENKNKNKYNDYELYNLKN |
| | | ASIKVSSKNDPQLKVDLKQLRLTLEYLELFDNRLKEKRNNI |
| | | SHFNYLNGQLGNSILELFDDARDVLSYDRKLKNAVSKSLK |
| | | EILSSHGMEVTFKPLYQTNHHLKIDKLQPKKIHHLGEKSTV |
| | | SSNQVSNEYCQLVRTLLTMK |
| SEQ ID NO: 19 | Leptotrichia | MKVTKVGGISHKKYTSEGRLVKSESEENRTDERLSALLNM |
| | buccalis (Lbu) | RLDMYIKNPSSTETKENQKRIGKLKKFFSNKMVYLKDNTL |
| | C2c2 amino | SLKNGKKENIDREYSETDILESDVRDKKNFAVLKKIYLNEN |
| | acid sequence | VNSEELEVFRNDIKKKLNKINSLKYSFEKNKANYQKINEN |
| | | NIEKVEGKSKRNIIYDYYRESAKRDAYVSNVKEAFDKLYK |
| | | EEDIAKLVLEIENLTKLEKYKIREFYHEIIGRKNDKENFAKII |
| | | YEEIQNVNNMKELIEKVPDMSELKKSQVFYKYYLDKEELN |
| | | DKNIKYAFCHFVEIEMSQLLKNYVYKRLSNISNDKIKRIFE |
| | | YQNLKKLIENKLLNKLDTYVRNCGKYNYYLQDGEIATSDF |
| | | IARNRQNEAFLRNIIGVSSVAYFSLRNILETENENDITGRMR |
| | | GKTVKNNKGEEKYVSGEVDKIYNENKKNEVKENLKMFYS |
| | | YDFNMDNKNEIEDFFANIDEAISSIRHGIVHFNLELEGKDIF |
| | | AFKNIAPSEISKKMFQNEINEKKLKLKIFRQLNSANVFRYL |
| | | EKYKILNYLKRTRFEFVNKNIPFVPSFTKLYSRIDDLKNSLG |
| | | IYWKTPKTNDDNKTKEIIDAQIYLLKNIYYGEFLNYFMSNN |
| | | GNFFEISKEIIELNKNDKRNLKTGFYKLQKFEDIQEKIPKEY |
| | | LANIQSLYMINAGNQDEEEKDTYIDFIQKIFLKGFMTYLAN |
| | | NGRLSLIYIGSDEETNTSLAEKKQEFDKFLKKYEQNNNIKIP |
| | | YEINEFLREIKLGNILKYTERLNMFYLILKLLNHKELTNLK |
| | | GSLEKYQSANKEEAFSDQLELINLLNLDNNRVTEDFELEA |
| | | DEIGKFLDFNGNKVKDNKELKKFDTNKIYFDGENIIKHRAF |
| | | YNIKKYGMLNLLEKIADKAGYKISIEELKKYSNKKNEIEKN |
| | | HKMQENLHRKYARPRKDEKFTDEDYESYKQAIENIEEYTH |
| | | LKNKVEFNELNLLQGLLLRILHRLVGYTSIWERDLRFRLK |
| | | GEFPENQYIEEIFNFENKKNVKYKGGQIVEKYIKFYKELHQ |
| | | NDEVKINKYSSANIKVLKQEKKDLYIRNYIAHFNYIPHAEIS |
| | | LLEVLENLRKLLSYDRKLKNAVMKSVVDILKEYGFVATFK |
| | | IGADKKIGIQTLESEKIVHLKNLKKKKLMTDRNSEELCKLV |
| | | KIMFEYKMEEKKSEN |
| SEQ ID NO: 20 | Leptotrichia | MGNLFGHKRWYEVRDKKDFKIKRKVKVKRNYDGNKYIL |
| | shahii (Lsh) | NINENNNKEKIDNNKFIRKYINYKKNDNILKEFTRKFHAGN |
| | C2c2 protein | ILFKLKGKEGIIRIENNDDFLETEEVVLYIEAYGKSEKLKAL |
| | | GITKKKIIDEAIRQGITKDDKKIEIKRQENEEEIEIDIRDEYTN |
| | | KTLNDCSIILRIIENDELETKKSIYEIFKNINMSLYKIIEKIIEN |
| | | ETEKVFENRYYEEHLREKLLKDDKIDVILTNFMEIREKIKS |
| | | NLEILGFVKFYLNVGGDKKKSKNKKMLVEKILNINVDLTV |
| | | EDIADFVIKELEFWNITKRIEKVKKVNNEFLEKRRNRTYIK |
| | | SYVLLDKHEKFKIERENKKDKIVKFFVENIKNNSIKEKIEKI |
| | | LAEFKIDELIKKLEKELKKGNCDTEIFGIFKKHYKVNFDSK |
| | | KFSKKSDEEKELYKIIYRYLKGRIEKILVNEQKVRLKKMEK |
| | | IEIEKILNESILSEKILKRVKQYTLEHIMYLGKLRHNDIDMT |
| | | TVNTDDFSRLHAKEELDLELITFFASTNMELNKIFSRENINN |
| | | DENIDFFGGDREKNYVLDKKILNSKIKIIRDLDFIDNKNNIT |
| | | NNFIRKFTKIGTNERNRILHAISKERDLQGTQDDYNKVINII |
| | | QNLKISDEEVSKALNLDVVFKDKKNIITKINDIKISEENNND |
| | | IKYLPSFSKVLPEILNLYRNNPKNEPFDTIETEKIVLNALIYV |
| | | NKELYKKLILEDDLEENESKNIFLQELKKTLGNIDEIDENIIE |
| | | NYYKNAQISASKGNNKAIKKYQKKVIECYIGYLRKNYEEL |
| | | FDFSDFKMNIQEIKKQIKDINDNKTYERITVKTSDKTIVIND |
| | | DFEYIISIFALLNSNAVINKIRNRFFATSVWLNTSEYQNIIDIL |
| | | DEIMQLNTLRNECITENWNLNLEEFIQKMKEIEKDFDDFKI |
| | | QTKKEIFNNYYEDIKNNILTEFKDDINGCDVLEKKLEKIVIF |
| | | DDETKFEIDKKSNILQDEQRKLSNINKKDLKKKVDQYIKD |
| | | KDQEIKSKILCRIIFNSDFLKKYKKEIDNLIEDMESENENKF |
| | | QEIYYPKERKNELYIYKKNLFLNIGNPNFDKIYGLISNDIKM |
| | | ADAKFLFNIDGKNIRKNKISEIDAILKNLNDKLNGYSKEYK |
| | | EKYIKKLKENDDFFAKNIQNKNYKSFEKDYNRVSEYKKIR |
| | | DLVEFNYLNKIESYLIDINWKLAIQMARFERDMHYIVNGL |
| | | RELGIIKLSGYNTGISRAYPKRNGSDGFYTTTAYYKFFDEE |
| | | SYKKFEKICYGFGIDLSENSEINKPENESIRNYISHFYIVRNP |
| | | FADYSIAEQIDRVSNLLSYSTRYNNSTYASVFEVFKKDVNL |
| | | DYDELKKKFKLIGNNDILERLMKPKKVSVLELESYNSDYI |
| | | KNLIIELLTKIENTNDTL |
| SEQ ID NO: 21 | Rhodobacter | MQIGKVQGRTISEFGDPAGGLKRKISTDGKNRKELPAHLSS |
| | capsulatus | DPKALIGQWISGIDKIYRKPDSRKSDGKAIHSPTPSKMQFD |
| | C2c2 amino | ARDDLGEAFWKLVSEAGLAQDSDYDQFKRRLHPYGDKFQ |
| | acid sequence | PADSGAKLKFEADPPEPQAFHGRWYGAMSKRGNDAKELA |
| | | AALYEHLHVDEKRIDGQPKRNPKTDKFAPGLVVARALGIE |
| | | SSVLPRGMARLARNWGEEEIQTYFVVDVAASVKEVAKAA |
| | | VSAAQAFDPPRQVSGRSLSPKVGFALAEHLERVTGSKRCS |
| | | FDPAAGPSVLALHDEVKKTYKRLCARGKNAARAFPADKT |
| | | ELLALMRHTHENRVRNQMVRMGRVSEYRGQQAGDLAQS |
| | | HYWTSAGQTEIKESEIFVRLWVGAFALAGRSMKAWIDPM |
| | | GKIVNTEKNDRDLTAAVNIRQVISNKEMVAEAMARRGIYF |
| | | GETPELDRLGAEGNEGFVFALLRYLRGCRNQTFHLGARAG |
| | | FLKEIRKELEKTRWGKAKEAEHVVLTDKTVAAIRAIIDND |
| | | AKALGARLLADLSGAFVAHYASKEHFSTLYSEIVKAVKDA |
| | | PEVSSGLPRLKLLLKRADGVRGYVHGLRDTRKHAFATKLP |
| | | PPPAPRELDDPATKARYIALLRLYDGPFRAYASGITGTALA |
| | | GPAARAKEAATALAQSVNVTKAYSDVMEGRSSRLRPPND |
| | | GETLREYLSALTGETATEFRVQIGYESDSENARKQAEFIEN |
| | | YRRDMLAFMFEDYIRAKGFDWILKIEPGATAMTRAPVLPE |
| | | PIDTRGQYEHWQAALYLVMHFVPASDVSNLLHQLRKWEA |
| | | LQGKYELVQDGDATDQADARREALDLVKRFRDVLVLFLK |
| | | TGEARFEGRAAPFDLKPFRALFANPATFDRLFMATPTTARP |
| | | AEDDPEGDGASEPELRVARTLRGLRQIARYNHMAVLSDLF |
| | | AKHKVRDEEVARLAEIEDETQEKSQIVAAQELRTDLHDKV |
| | | MKCHPKTISPEERQSYAAAIKTIEEHRFLVGRVYLGDHLRL |
| | | HRLMMDVIGRLIDYAGAYERDTGTFLINASKQLGAGADW |
| | | AVTIAGAANTDARTQTRKDLAHFNVLDRADGTPDLTALV |
| | | NRAREMMAYDRKRKNAVPRSILDMLARLGLTLKWQMKD |
| | | HLLQDATITQAAIKHLDKVRLTVGGPAAVTEARFSQDYLQ |
| | | MVAAVFNGSVQNPKPRRRDDGDAWHKPPKPATAQSQPD |
| | | QKPPNKAPSAGSRLPPPQVGEVYEGVVVKVIDTGSLGFLA |
| | | VEGVAGNIGLHISRLRRIREDAIIVGRRYRFRVEIYVPPKSN |
| | | TSKLNAADLVRID |
| SEQ ID NO: 22 | Carnobacterium | MRITKVKIKLDNKLYQVTMQKEEKYGTLKLNEESRKSTAE |
| | gallinarum | ILRLKKASFNKSFHSKTINSQKENKNATIKKNGDYISQIFEK |
| | C2c2 amino | LVGVDTNKNIRKPKMSLTDLKDLPKKDLALFIKRKFKNDD |
| | acid sequence | IVEIKNLDLISLFYNALQKVPGEHFTDESWADFCQEMMPY |
| | | REYKNKFIERKIILLANSIEQNKGFSINPETFSKRKRVLHQW |
| | | AIEVQERGDFSILDEKLSKLAEIYNFKKMCKRVQDELNDLE |
| | | KSMKKGKNPEKEKEAYKKQKNFKIKTIWKDYPYKTHIGLI |
| | | EKIKENEELNQFNIEIGKYFEHYFPIKKERCTEDEPYYLNSE |
| | | TIATTVNYQLKNALISYLMQIGKYKQFGLENQVLDSKKLQ |
| | | EIGIYEGFQTKFMDACVFATSSLKNIIEPMRSGDILGKREFK |
| | | EAIATSSFVNYHHFFPYFPFELKGMKDRESELIPFGEQTEAK |
| | | QMQNIWALRGSVQQIRNEIFHSFDKNQKFNLPQLDKSNFE |
| | | FDASENSTGKSQSYIETDYKFLFEAEKNQLEQFFIERIKSSG |
| | | ALEYYPLKSLEKLFAKKEMKFSLGSQVVAFAPSYKKLVKK |
| | | GHSYQTATEGTANYLGLSYYNRYELKEESFQAQYYLLKLI |
| | | YQYVFLPNFSQGNSPAFRETVKAILRINKDEARKKMKKNK |
| | | KFLRKYAFEQVREMEFKETPDQYMSYLQSEMREEKVRKA |
| | | EKNDKGFEKNITMNFEKLLMQIFVKGFDVFLTTFAGKELL |
| | | LSSEEKVIKETEISLSKKINEREKTLKASIQVEHQLVATNSAI |
| | | SYWLFCKLLDSRHLNELRNEMIKFKQSRIKFNHTQHAELIQ |
| | | NLLPIVELTILSNDYDEKNDSQNVDVSAYFEDKSLYETAPY |
| | | VQTDDRTRVSFRPILKLEKYHTKSLIEALLKDNPQFRVAAT |
| | | DIQEWMHKREEIGELVEKRKNLHTEWAEGQQTLGAEKRE |
| | | EYRDYCKKIDRFNWKANKVTLTYLSQLHYLITDLLGRMV |
| | | GFSALFERDLVYFSRSFSELGGETYHISDYKNLSGVLRLNA |
| | | EVKPIKIKNIKVIDNEENPYKGNEPEVKPFLDRLHAYLENVI |
| | | GIKAVHGKIRNQTAHLSVLQLELSMIESMNNLRDLMAYDR |
| | | KLKNAVTKSMIKILDKHGMILKLKIDENHKNFEIESLIPKEII |
| | | HLKDKAIKTNQVSEEYCQLVLALLTTNPGNQLN |
| SEQ ID NO: 23 | Herbinix | MKLTRRRISGNSVDQKITAAFYRDMSQGLLYYDSEDNDCT |
| | hemicellulosilytica | DKVIESMDFERSWRGRILKNGEDDKNPFYMFVKGLVGSN |
| | C2c2 | DKIVCEPIDVDSDPDNLDILINKNLTGFGRNLKAPDSNDTL |
| | amino acid | ENLIRKIQAGIPEEEVLPELKKIKEMIQKDIVNRKEQLLKSIK |
| | sequence | NNRIPFSLEGSKLVPSTKKMKWLFKLIDVPNKTFNEKMLE |
| | | KYWEIYDYDKLKANITNRLDKTDKKARSISRAVSEELREY |
| | | HKNLRTNYNRFVSGDRPAAGLDNGGSAKYNPDKEEFLLF |
| | | LKEVEQYFKKYFPVKSKHSNKSKDKSLVDKYKNYCSYKV |
| | | VKKEVNRSIINQLVAGLIQQGKLLYYFYYNDTWQEDFLNS |
| | | YGLSYIQVEEAFKKSVMTSLSWGINRLTSFFIDDSNTVKFD |
| | | DITTKKAKEAIESNYFNKLRTCSRMQDHFKEKLAFFYPVY |
| | | VKDKKDRPDDDIENLIVLVKNAIESVSYLRNRTFHFKESSL |
| | | LELLKELDDKNSGQNKIDYSVAAEFIKRDIENLYDVFREQI |
| | | RSLGIAEYYKADMISDCFKTCGLEFALYSPKNSLMPAFKN |
| | | VYKRGANLNKAYIRDKGPKETGDQGQNSYKALEEYRELT |
| | | WYIEVKNNDQSYNAYKNLLQLIYYHAFLPEVRENEALITD |
| | | FINRTKEWNRKETEERLNTKNNKKHKNFDENDDITVNTYR |
| | | YESIPDYQGESLDDYLKVLQRKQMARAKEVNEKEEGNNN |
| | | YIQFIRDVVVWAFGAYLENKLKNYKNELQPPLSKENIGLN |
| | | DTLKELFPEEKVKSPFNIKCRFSISTFIDNKGKSTDNTSAEA |
| | | VKTDGKEDEKDKKNIKRKDLLCFYLFLRLLDENEICKLQH |
| | | QFIKYRCSLKERRFPGNRTKLEKETELLAELEELMELVRFT |
| | | MPSIPEISAKAESGYDTMIKKYFKDFIEKKVFKNPKTSNLY |
| | | YHSDSKTPVTRKYMALLMRSAPLHLYKDIFKGYYLITKKE |
| | | CLEYIKLSNIIKDYQNSLNELHEQLERIKLKSEKQNGKDSL |
| | | YLDKKDFYKVKEYVENLEQVARYKHLQHKINFESLYRIFR |
| | | IHVDIAARMVGYTQDWERDMHFLFKALVYNGVLEERRFE |
| | | AIFNNNDDNNDGRIVKKIQNNLNNKNRELVSMLCWNKKL |
| | | NKNEFGAIIWKRNPIAHLNHFTQTEQNSKSSLESLINSLRIL |
| | | LAYDRKRQNAVTKTINDLLLNDYHIRIKWEGRVDEGQIYF |
| | | NIKEKEDIENEPIIHLKHLHKKDCYIYKNSYMFDKQKEWIC |
| | | NGIKEEVYDKSILKCIGNLFKFDYEDKNKSSANPKHT |
| SEQ ID NO: 24 | Paludibacter | MRVSKVKVKDGGKDKMVLVHRKTTGAQLVYSGQPVSNE |
| | propionicigenes | TSNILPEKKRQSFDLSTLNKTIIKFDTAKKQKLNVDQYKIV |
| | C2c2 | EKIFKYPKQELPKQIKAEEILPFLNHKFQEPVKYWKNGKEE |
| | amino acid | SFNLTLLIVEAVQAQDKRKLQPYYDWKTWYIQTKSDLLK |
| | sequence | KSIENNRIDLTENLSKRKKALLAWETEFTASGSIDLTHYHK |
| | | VYMTDVLCKMLQDVKPLTDDKGKINTNAYHRGLKKALQ |
| | | NHQPAIFGTREVPNEANRADNQLSIYHLEVVKYLEHYFPIK |
| | | TSKRRNTADDIAHYLKAQTLKTTIEKQLVNAIRANIIQQGK |
| | | TNHHELKADTTSNDLIRIKTNEAFVLNLTGTCAFAANNIRN |
| | | MVDNEQTNDILGKGDFIKSLLKDNTNSQLYSFFFGEGLSTN |
| | | KAEKETQLWGIRGAVQQIRNNVNHYKKDALKTVFNISNFE |
| | | NPTITDPKQQTNYADTIYKARFINELEKIPEAFAQQLKTGG |
| | | AVSYYTIENLKSLLTTFQFSLCRSTIPFAPGFKKVFNGGINY |
| | | QNAKQDESFYELMLEQYLRKENFAEESYNARYFMLKLIY |
| | | NNLFLPGFTTDRKAFADSVGFVQMQNKKQAEKVNPRKKE |
| | | AYAFEAVRPMTAADSIADYMAYVQSELMQEQNKKEEKV |
| | | AEETRINFEKFVLQVFIKGFDSFLRAKEFDFVQMPQPQLTA |
| | | TASNQQKADKLNQLEASITADCKLTPQYAKADDATHIAFY |
| | | VFCKLLDAAHLSNLRNELIKFRESVNEFKFHHLLEIIEICLLS |
| | | ADVVPTDYRDLYSSEADCLARLRPFIEQGADITNWSDLFV |
| | | QSDKHSPVIHANIELSVKYGTTKLLEQIINKDTQFKTTEANF |
| | | TAWNTAQKSIEQLIKQREDHHEQWVKAKNADDKEKQER |
| | | KREKSNFAQKFIEKHGDDYLDICDYINTYNWLDNKMHFV |
| | | HLNRLHGLTIELLGRMAGFVALFDRDFQFFDEQQIADEFK |
| | | LHGFVNLHSIDKKLNEVPTKKIKEIYDIRNKIIQINGNKINES |
| | | VRANLIQFISSKRNYYNNAFLHVSNDEIKEKQMYDIRNHIA |
| | | HFNYLTKDAADFSLIDLINELRELLHYDRKLKNAVSKAFID |
| | | LFDKHGMILKLKLNADHKLKVESLEPKKIYHLGSSAKDKP |
| | | EYQYCTNQVMMAYCNMCRSLLEMKK |
| SEQ ID NO: 25 | Leptotrichia | MYMKITKIDGVSHYKKQDKGILKKKWKDLDERKQREKIE |
| | wadei (Lwa) | ARYNKQIESKIYKEFFRLKNKKRIEKEEDQNIKSLYFFIKEL |
| | C2c2 amino | YLNEKNEEWELKNINLEILDDKERVIKGYKFKEDVYFFKE |
| | acid sequence | GYKEYYLRILFNNLIEKVQNENREKVRKNKEFLDLKEIFKK |
| | | YKNRKIDLLLKSINNNKINLEYKKENVNEEIYGINPTNDRE |
| | | MTFYELLKEIIEKKDEQKSILEEKLDNFDITNFLENIEKIFNE |
| | | ETEINIIKGKVLNELREYIKEKEENNSDNKLKQIYNLELKK |
| | | YIENNFSYKKQKSKSKNGKNDYLYLNFLKKIMFIEEVDEK |
| | | KEINKEKFKNKINSNFKNLFVQHILDYGKLLYYKENDEYIK |
| | | NTGQLETKDLEYIKTKETLIRKMAVLVSFAANSYYNLFGR |
| | | VSGDILGTEVVKSSKTNVIKVGSHIFKEKMLNYFFDFEIFD |
| | | ANKIVEILESISYSIYNVRNGVGHFNKLILGKYKKKDINTN |
| | | KRIEEDLNNNEEIKGYFIKKRGEIERKVKEKFLSNNLQYYY |
| | | SKEKIENYFEVYEFEILKRKIPFAPNFKR11KKGEDLFNNKN |
| | | NKKYEYFKNFDKNSAEEKKEFLKTRNFLLKELYYNNFYK |
| | | EFLSKKEEFEKIVLEVKEEKKSRGNINNKKSGVSFQSIDDY |
| | | DTKINISDYIASIHKKEMERVEKYNEEKQKDTAKYIRDFVE |
| | | EIFLTGFINYLEKDKRLHFLKEEFSILCNNNNNVVDFNININ |
| | | EEKIKEFLKENDSKTLNLYLFFNMIDSKRISEFRNELVKYK |
| | | QFTKKRLDEEKEFLGIKIELYETLIEFVILTREKLDTKKSEEI |
| | | DAWLVDKLYVKDSNEYKEYEEILKLFVDEKILSSKEAPYY |
| | | ATDNKTPILLSNFEKTRKYGTQSFLSEIQSNYKYSKVEKENI |
| | | EDYNKKEEIEQKKKSNIEKLQDLKVELHKKWEQNKITEKE |
| | | IEKYNNTTRKINEYNYLKNKEELQNVYLLHEMLSDLLARN |
| | | VAFFNKWERDFKFIVIAIKQFLRENDKEKVNEFLNPPDNSK |
| | | GKKVYFSVSKYKNTVENIDGIHKNFMNLIFLNNKFMNRKI |
| | | DKMNCAIWVYFRNYIAHFLHLHTKNEKISLISQMNLLIKLF |
| | | SYDKKVQNHILKSTKTLLEKYNIQINFEISNDKNEVFKYKI |
| | | KNRLYSKKGKMLGKNNKFEILENEFLENVKAMLEYSE |
| SEQ ID NO: 26 | Bergeyella | MENKTSLGNNIYYNPFKPQDKSYFAGYFNAAMENTDSVF |
| | zoohelcum | RELGKRLKGKEYTSENFFDAIFKENISLVEYERYVKLLSDY |
| | Cas13b | FPMARLLDKKEVPIKERKENFKKNFKGIIKAVRDLRNFYT |
| | | HKEHGEVEITDEIFGVLDEMLKSTVLTVKKKKVKTDKTKE |
| | | ILKKSIEKQLDILCQKKLEYLRDTARKIEEKRRNQRERGEK |
| | | ELVAPFKYSDKRDDLIAAIYNDAFDVYIDKKKDSLKESSK |
| | | AKYNTKSDPQQEEGDLKIPISKNGVVFLLSLFLTKQEIHAF |
| | | KSKIAGFKATVIDEATVSEATVSHGKNSICFMATHEIFSHL |
| | | AYKKLKRKVRTAEINYGEAENAEQLSVYAKETLMMQML |
| | | DELSKVPDVVYQNLSEDVQKTFIEDWNEYLKENNGDVGT |
| | | MEEEQVIHPVIRKRYEDKFNYFAIRFLDEFAQFPTLRFQVH |
| | | LGNYLHDSRPKENLISDRRIKEKITVFGRLSELEHKKALFIK |
| | | NTETNEDREHYWEIFPNPNYDFPKENISVNDKDFPIAGSILD |
| | | REKQPVAGKIGIKVKLLNQQYVSEVDKAVKAHQLKQRKA |
| | | SKPSIQNIIEEIVPINESNPKEAIVFGGQPTAYLSMNDIHSILY |
| | | EFFDKWEKKKEKLEKKGEKELRKEIGKELEKKIVGKIQAQI |
| | | QQIIDKDTNAKILKPYQDGNSTAIDKEKLIKDLKQEQNILQ |
| | | KLKDEQTVREKEYNDFIAYQDKNREINKVRDRNHKQYLK |
| | | DNLKRKYPEAPARKEVLYYREKGKVAVWLANDIKRFMPT |
| | | DFKNEWKGEQHSLLQKSLAYYEQCKEELKNLLPEKVFQH |
| | | LPFKLGGYFQQKYLYQFYTCYLDKRLEYISGLVQQAENFK |
| | | SENKVFKKVENECFKFLKKQNYTHKELDARVQSILGYPIFL |
| | | ERGFMDEKPTIIKGKTFKGNEALFADWFRYYKEYQNFQTF |
| | | YDTENYPLVELEKKQADRKRKTKIYQQKKNDVFTLLMAK |
| | | HIFKSVFKQDSIDQFSLEDLYQSREERLGNQERARQTGERN |
| | | TNYIWNKTVDLKLCDGKITVENVKLKNVGDFIKYEYDQR |
| | | VQAFLKYEENIEWQAFLIKESKEEENYPYVVEREIEQYEKV |
| | | RREELLKEVHLIEEYILEKVKDKEILKKGDNQNFKYYILNG |
| | | LLKQLKNEDVESYKVFNLNTEPEDVNINQLKQEATDLEQK |
| | | AFVLTYIRNKFAHNQLPKKEFWDYCQEKYGKIEKEKTYAE |
| | | YFAEVFKKEKEALIK |
| SEQ ID NO: 27 | Prevotella | MEDDKKTTDSIRYELKDKHFWAAFLNLARHNVYITVNHI |
| | intermedia | NKILEEGEINRDGYETTLKNTWNEIKDINKKDRLSKLIIKHF |
| | Cas 13b | PFLEAATYRLNPTDTTKQKEEKQAEAQSLESLRKSFFVFIY |
| | | KLRDLRNHYSHYKHSKSLERPKFEEGLLEKMYNIFNASIRL |
| | | VKEDYQYNKDINPDEDFKHLDRTEEEFNYYFTKDNEGNIT |
| | | ESGLLFFVSLFLEKKDAIWMQQKLRGFKDNRENKKKMTN |
| | | EVFCRSRMLLPKLRLQSTQTQDWILLDMLNELIRCPKSLYE |
| | | RLREEDREKFRVPIEIADEDYDAEQEPFKNTLVRHQDRFPY |
| | | FALRYFDYNEIFTNLRFQIDLGTYHFSIYKKQIGDYKESHH |
| | | LTHKLYGFERIQEFTKQNRPDEWRKFVKTFNSFETSKEPYI |
| | | PETTPHYHLENQKIGIRFRNDNDKIWPSLKTNSEKNEKSKY |
| | | KLDKSFQAEAFLSVHELLPMMFYYLLLKTENTDNDNEIET |
| | | KKKENKNDKQEKHKIEEIIENKITEIYALYDTFANGEIKSID |
| | | ELEEYCKGKDIEIGHLPKQMIAILKDEHKVMATEAERKQE |
| | | EMLVDVQKSLESLDNQINEEIENVERKNSSLKSGKIASWLV |
| | | NDMMRFQPVQKDNEGKPLNNSKANSTEYQLLQRTLAFFG |
| | | SEHERLAPYFKQTKLIESSNPHPFLKDTEWEKCNNILSFYRS |
| | | YLEAKKNFLESLKPEDWEKNQYFLKLKEPKTKPKTLVQG |
| | | WKNGFNLPRGIFTEPIRKWFMKHRENITVAELKRVGLVAK |
| | | VIPLFFSEEYKDSVQPFYNYHFNVGNINKPDEKNFLNCEER |
| | | RELLRKKKDEFKKMTDKEKEENPSYLEFKSWNKFERELRL |
| | | VRNQDIVTWLLCMELFNKKKIKELNVEKIYLKNINTNTTK |
| | | KEKNTEEKNGEEKNIKEKNNILNRIMPMRLPIKVYGRENFS |
| | | KNKKKKIRRNTFFTVYIEEKGTKLLKQGNFKALERDRRLG |
| | | GLFSFVKTPSKAESKSNTISKLRVEYELGEYQKARIEIIKDM |
| | | LALEKTLIDKYNSLDTDNFNKMLTDWLELKGEPDKASFQ |
| | | NDVDLLIAVRNAFSHNQYPMRNRIAFANINPFSLSSANTSE |
| | | EKGLGIANQLKDKTHKTIEKIIEIEKPIETKE |
| SEQ ID NO: 28 | Prevotella | MQKQDKLFVDRKKNAIFAFPKYITIMENKEKPEPIYYELTD |
| | buccae | KHFWAAFLNLARHNVYTTINHINRRLEIAELKDDGYMMGI |
| | Cas13b | KGSWNEQAKKLDKKVRLRDLIMKHFPFLEAAAYEMTNSK |
| | | SPNNKEQREKEQSEALSLNNLKNVLFIFLEKLQVLRNYYS |
| | | HYKYSEESPKPIFETSLLKNMYKVFDANVRLVKRDYMHH |
| | | ENIDMQRDFTHLNRKKQVGRTKNIIDSPNFHYHFADKEGN |
| | | MTIAGLLFFVSLFLDKKDAIWMQKKLKGFKDGRNLREQM |
| | | TNEVFCRSRISLPKLKLENVQTKDWMQLDMLNELVRCPKS |
| | | LYERLREKDRESFKVPFDIFSDDYNAEEEPFKNTLVRHQDR |
| | | FPYFVLRYFDLNEIFEQLRFQIDLGTYHFSIYNKRIGDEDEV |
| | | RHLTHHLYGFARIQDFAPQNQPEEWRKLVKDLDHFETSQE |
| | | PYISKTAPHYHLENEKIGIKFCSAHNNLFPSLQTDKTCNGR |
| | | SKFNLGTQFTAEAFLSVHELLPMMFYYLLLTKDYSRKESA |
| | | DKVEGIIRKEISNIYAIYDAFANNEINSIADLTRRLQNTNILQ |
| | | GHLPKQMISILKGRQKDMGKEAERKIGEMIDDTQRRLDLL |
| | | CKQTNQKIRIGKRNAGLLKSGKIADWLVNDMMRFQPVQK |
| | | DQNNIPINNSKANSTEYRMLQRALALFGSENFRLKAYFNQ |
| | | MNLVGNDNPHPFLAETQWEHQTNILSFYRNYLEARKKYL |
| | | KGLKPQNWKQYQHFLILKVQKTNRNTLVTGWKNSFNLPR |
| | | GIFTQPIREWFEKHNNSKRIYDQILSFDRVGFVAKAIPLYFA |
| | | EEYKDNVQPFYDYPFNIGNRLKPKKRQFLDKKERVELWQ |
| | | KNKELFKNYPSEKKKTDLAYLDFLSWKKFERELRLIKNQD |
| | | IVTWLMFKELFNMATVEGLKIGEIHLRDIDTNTANEESNNI |
| | | LNRIMPMKLPVKTYETDNKGNILKERPLATFYIEETETKVL |
| | | KQGNFKALVKDRRLNGLFSFAETTDLNLEEHPISKLSVDLE |
| | | LIKYQTTRISIFEMTLGLEKKLIDKYSTLPTDSFRNMLERWL |
| | | QCKANRPELKNYVNSLIAVRNAFSHNQYPMYDATLFAEV |
| | | KKFTLFPSVDTKKIELNIAPQLLEIVGKAIKEIEKSENKN |
| SEQ ID NO: 29 | Porphyromonas | MNTVPASENKGQSRTVEDDPQYFGLYLNLARENLIEVESH |
| | gingivalis | VRIKFGKKKLNEESLKQSLLCDHLLSVDRWTKVYGHSRR |
| | Cas 13b | YLPFLHYFDPDSQIEKDHDSKTGVDPDSAQRLIRELYSLLD |
| | | FLRNDFSHNRLDGTTFEHLEVSPDISSFITGTYSLACGRAQS |
| | | RFAVFFKPDDFVLAKNRKEQLISVADGKECLTVSGFAFFIC |
| | | LFLDREQASGMLSRIRGFKRTDENWARAVHETFCDLCIRH |
| | | PHDRLESSNTKEALLLDMLNELNRCPRILYDMLPEEERAQ |
| | | FLPALDENSMNNLSENSLDEESRLLWDGSSDWAEALTKRI |
| | | RHQDRFPYLMLRFIEEMDLLKGIRFRVDLGEIELDSYSKKV |
| | | GRNGEYDRTITDHALAFGKLSDFQNEEEVSRMISGEASYP |
| | | VRFSLFAPRYAIYDNKIGYCHTSDPVYPKSKTGEKRALSNP |
| | | QSMGFISVHDLRKLLLMELLCEGSFSRMQSDFLRKANRIL |
| | | DETAEGKLQFSALFPEMRHRFIPPQNPKSKDRREKAETTLE |
| | | KYKQEIKGRKDKLNSQLLSAFDMDQRQLPSRLLDEWMNI |
| | | RPASHSVKLRTYVKQLNEDCRLRLRKFRKDGDGKARAIPL |
| | | VGEMATFLSQDIVRMIISEETKKLITSAYYNEMQRSLAQYA |
| | | GEENRRQFRAIVAELRLLDPSSGHPFLSATMETAHRYTEGF |
| | | YKCYLEKKREWLAKIFYRPEQDENTKRRISVFFVPDGEAR |
| | | KLLPLLIRRRMKEQNDLQDWIRNKQAHPIDLPSHLFDSKV |
| | | MELLKVKDGKKKWNEAFKDWWSTKYPDGMQPFYGLRR |
| | | ELNIHGKSVSYIPSDGKKFADCYTHLMEKTVRDKKRELRT |
| | | AGKPVPPDLAADIKRSFHRAVNEREFMLRLVQEDDRLML |
| | | MAINKMMTDREEDILPGLKNIDSILDEENQFSLAVHAKVL |
| | | EKEGEGGDNSLSLVPATIEIKSKRKDWSKYIRYRYDRRVP |
| | | GLMSHFPEHKATLDEVKTLLGEYDRCRIKIFDWAFALEGA |
| | | IMSDRDLKPYLHESSSREGKSGEHSTLVKMLVEKKGCLTP |
| | | DESQYLILIRNKAAHNQFPCAAEMPLIYRDVSAKVGSIEGS |
| | | SAKDLPEGSSLVDSLWKKYEMIIRKILPILDPENRFFGKLLN |
| | | NMSQPINDL |
| SEQ ID NO: 30 | Bacteroides | MESIKNSQKSTGKTLQKDPPYFGLYLNMALLNVRKVENHI |
| | pyogenes | RKWLGDVALLPEKSGFHSLLTTDNLSSAKWTRFYYKSRKF |
| | Cas13b | LPFLEMFDSDKKSYENRRETAECLDTIDRQKISSLLKEVYG |
| | | KLQDIRNAFSHYHIDDQSVKHTALIISSEMHRFIENAYSFAL |
| | | QKTRARFTGVFVETDFLQAEEKGDNKKFFAIGGNEGIKLK |
| | | DNALIFLICLFLDREEAFKFLSRATGFKSTKEKGFLAVRETF |
| | | CALCCRQPHERLLSVNPREALLMDMLNELNRCPDILFEML |
| | | DEKDQKSFLPLLGEEEQAHILENSLNDELCEAIDDPFEMIAS |
| | | LSKRVRYKNRFPYLMLRYIEEKNLLPFIRFRIDLGCLELASY |
| | | PKKMGEENNYERSVTDHAMAFGRLTDFHNEDAVLQQITK |
| | | GITDEVRFSLYAPRYAIYNNKIGFVRTSGSDKISFPTLKKKG |
| | | GEGHCVAYTLQNTKSFGFISIYDLRKILLLSFLDKDKAKNI |
| | | VSGLLEQCEKHWKDLSENLFDAIRTELQKEFPVPLIRYTLP |
| | | RSKGGKLVSSKLADKQEKYESEFERRKEKLTEILSEKDFDL |
| | | SQIPRRMIDEWLNVLPTSREKKLKGYVETLKLDCRERLRV |
| | | FEKREKGEHPLPPRIGEMATDLAKDIIRMVIDQGVKQRITS |
| | | AYYSEIQRCLAQYAGDDNRRHLDSIIRELRLKDTKNGHPFL |
| | | GKVLRPGLGHTEKLYQRYFEEKKEWLEATFYPAASPKRVP |
| | | RFVNPPTGKQKELPLIIRNLMKERPEWRDWKQRKNSHPID |
| | | LPSQLFENEICRLLKDKIGKEPSGKLKWNEMFKLYWDKEF |
| | | PNGMQRFYRCKRRVEVFDKVVEYEYSEEGGNYKKYYEA |
| | | LIDEVVRQKISSSKEKSKLQVEDLTLSVRRVFKRAINEKEY |
| | | QLRLLCEDDRLLFMAVRDLYDWKEAQLDLDKIDNMLGEP |
| | | VSVSQVIQLEGGQPDAVIKAECKLKDVSKLMRYCYDGRV |
| | | KGLMPYFANHEATQEQVEMELRHYEDHRRRVFNWVFAL |
| | | EKSVLKNEKLRRFYEESQGGCEHRRCIDALRKASLVSEEE |
| | | YEFLVHIRNKSAHNQFPDLEIGKLPPNVTSGFCECIWSKYK |
| | | AIICRIIPFIDPERRFFGKLLEQK |
| SEQ ID NO: 31 | Cas13c | MTEKKSIIFKNKSSVEIVKKDIFSQTPDNMIRNYKITLKISEK |
| | | NPRVVEAEIEDLMNSTILKDGRRSARREKSMTERKLIEEKV |
| | | AENYSLLANCPMEEVDSIKIYKIKRFLTYRSNMLLYFASIN |
| | | SFLCEGIKGKDNETEEIWHLKDNDVRKEKVKENFKNKLIQ |
| | | STENYNSSLKNQIEEKEKLLRKESKKGAFYRTIIKKLQQERI |
| | | KELSEKSLTEDCEKIIKLYSELRHPLMHYDYQYFENLFENK |
| | | ENSELTKNLNLDIFKSLPLVRKMKLNNKVNYLEDNDTLFV |
| | | LQKTKKAKTLYQIYDALCEQKNGFNKFINDFFVSDGEENT |
| | | VFKQIINEKFQSEMEFLEKRISESEKKNEKLKKKFDSMKAH |
| | | FHNINSEDTKEAYFWDIHSSSNYKTKYNERKNLVNEYTEL |
| | | LGSSKEKKLLREEITQINRKLLKLKQEMEEITKKNSLFRLE |
| | | YKMKIAFGFLFCEFDGNISKFKDEFDASNQEKIIQYHKNGE |
| | | KYLTYFLKEEEKEKFNLEKMQKIIQKTEEEDWLLPETKNN |
| | | LFKFYLLTYLLLPYELKGDFLGFVKKHYYDIKNVDFMDEN |
| | | QNNIQVSQTVEKQEDYFYHKIRLFEKNTKKYEIVKYSIVPN |
| | | EKLKQYFEDLGIDIKYLTGSVESGEKWLGENLGIDIKYLTV |
| | | EQKSEVSEEKIKKFL |
| SEQ ID NO: 32 | Cas13c | MEKDKKGEKIDISQEMIEEDLRKILILFSRLRHSMVHYDYE |
| | | FYQALYSGKDFVISDKNNLENRMISQLLDLNIFKELSKVKL |
| | | IKDKAISNYLDKNTTIHVLGQDIKAIRLLDIYRDICGSKNGF |
| | | NKFINTMITISGEEDREYKEKVIEHFNKKMENLSTYLEKLE |
| | | KQDNAKRNNKRVYNLLKQKLIEQQKLKEWFGGPYVYDIH |
| | | SSKRYKELYIERKKLVDRHSKLFEEGLDEKNKKELTKINDE |
| | | LSKLNSEMKEMTKLNSKYRLQYKLQLAFGFILEEFDLNIDT |
| | | FINNFDKDKDLIISNFMKKRDIYLNRVLDRGDNRLKNIIKE |
| | | YKFRDTEDIFCNDRDNNLVKLYILMYILLPVEIRGDFLGFV |
| | | KKNYYDMKHVDFIDKKDKEDKDTFFHDLRLFEKNIRKLEI |
| | | TDYSLSSGFLSKEHKVDIEKKINDFINRNGAMKLPEDITIEE |
| | | FNKSLILPIMKNYQINFKLLNDIEISALFKIAKDRSITFKQAI |
| | | DEIKNEDIKKNSKKNDKNNHKDKNINFTQLMKRALHEKIP |
| | | YKAGMYQIRNNISHIDMEQLYIDPLNSYMNSNKNNITISEQ |
| | | IEKIIDVCVTGGVTGKELNNNIINDYYMKKEKLVFNLKLRK |
| | | QNDIVSIESQEKNKREEFVFKKYGLDYKDGEINIIEVIQKVN |
| | | SLQEELRNIKETSKEKLKNKETLFRDISLINGTIRKNINFKIK |
| | | EMVLDIVRMDEIRHINIHIYYKGENYTRSNIIKFKYAIDGEN |
| | | KKYYLKQHEINDINLELKDKFVTLICNMDKHPNKNKQTIN |
| | | LESNYIQNVKFIIP |
| SEQ ID NO: 33 | Cas13c | MENKGNNKKIDFDENYNILVAQIKEYFTKEIENYNNRIDNI |
| | | IDKKELLKYSEKKEESEKNKKLEELNKLKSQKLKILTDEEI |
| | | KADVIKIIKIFSDLRHSLMHYEYKYFENLFENKKNEELAEL |
| | | LNLNLFKNLTLLRQMKIENKTNYLEGREEFNIIGKNIKAKE |
| | | VLGHYNLLAEQKNGFNNFINSFFVQDGTENLEFKKLIDEHF |
| | | VNAKKRLERNIKKSKKLEKELEKMEQHYQRLNCAYVWDI |
| | | HTSTTYKKLYNKRKSLIEEYNKQINEIKDKEVITAINVELLR |
| | | IKKEMEEITKSNSLFRLKYKMQIAYAFLEIEFGGNIAKFKDE |
| | | FDCSKMEEVQKYLKKGVKYLKYYKDKEAQKNYEFPFEEI |
| | | FENKDTHNEEWLENTSENNLFKFYILTYLLLPMEFKGDFL |
| | | GVVKKHYYDIKNVDFTDESEKELSQVQLDKMIGDSFFHKI |
| | | RLFEKNTKRYEIIKYSILTSDEIKRYFRLLELDVPYFEYEKG |
| | | TDEIGIFNKNIILTIFKYYQIIFRLYNDLEIHGLFNISSDLDKIL |
| | | RDLKSYGNKNINFREFLYVIKQNNNSSTEEEYRKIWENLEA |
| | | KYLRLHLLTPEKEEIKTKTKEELEKLNEISNLRNGICHLNY |
| | | KEIIEEILKTEISEKNKEATLNEKIRKVINFIKENELDKVELG |
| | | FNFINDFFMKKEQFMFGQIKQVKEGNSDSITTERERKEKNN |
| | | KKLKETYELNCDNLSEFYETSNNLRERANSSSLLEDSAFLK |
| | | KIGLYKVKNNKVNSKVKDEEKRIENIKRKLLKDSSDIMGM |
| | | YKAEVVKKLKEKLILIFKHDEEKRIYVTVYDTSKAVPENIS |
| | | KEILVKRNNSKEEYFFEDNNKKYVTEYYTLEITETNELKVI |
| | | PAKKLEGKEFKTEKNKENKLMLNNHYCFNVKIIY |
| SEQ ID NO: 34 | Cas13c | MEEIKHKKNKSSIIRVIVSNYDMTGIKEIKVLYQKQGGVDT |
| | | FNLKTIINLESGNLEIISCKPKEREKYRYEFNCKTEINTISITK |
| | | KDKVLKKEIRKYSLELYFKNEKKDTVVAKVTDLLKAPDKI |
| | | EGERNHLRKLSSSTERKLLSKTLCKNYSEISKTPIEEIDSIKI |
| | | YKIKRFLNYRSNFLIYFALINDFLCAGVKEDDINEVWLIQD |
| | | KEHTAFLENRIEKITDYIFDKLSKDIENKKNQFEKRIKKYKT |
| | | SLEELKTETLEKNKTFYIDSIKTKITNLENKITELSLYNSKES |
| | | LKEDLIKIISIFTNLRHSLMHYDYKSFENLFENIENEELKNLL |
| | | DLNLFKSIRMSDEFKTKNRTNYLDGTESFTIVKKHQNLKK |
| | | LYTYYNNLCDKKNGFNTFINSFFVTDGIENTDFKNLIILHFE |
| | | KEMEEYKKSIEYYKIKISNEKNKSKKEKLKEKIDLLQSELIN |
| | | MREHKNLLKQIYFFDIHNSIKYKELYSERKNLIEQYNLQIN |
| | | GVKDVTAINHINTKLLSLKNKMDKITKQNSLYRLKYKLKI |
| | | AYSFLMIEFDGDVSKFKNNFDPTNLEKRVEYLDKKEEYLN |
| | | YTAPKNKFNFAKLEEELQKIQSTSEMGADYLNVSPENNLF |
| | | KFYILTYIMLPVEFKGDFLGFVKNHYYNIKNVDFMDESLL |
| | | DENEVDSNKLNEKIENLKDSSFFNKIRLFEKNIKKYEIVKYS |
| | | VSTQENMKEYFKQLNLDIPYLDYKSTDEIGIFNKNMILPIFK |
| | | YYQNVFKLCNDIEIHALLALANKKQQNLEYAIYCCSKKNS |
| | | LNYNELLKTFNRKTYQNLSFIRNKIAHLNYKELFSDLFNNE |
| | | LDLNTKVRCLIEFSQNNKFDQIDLGMNFINDYYMKKTRFIF |
| | | NQRRLRDLNVPSKEKIIDGKRKQQNDSNNELLKKYGLSRT |
| | | NIKDIFNKAWY |
| SEQ ID NO: 35 | Cas 13c | MKVRYRKQAQLDTFIIKTEIVNNDIFIKSIIEKAREKYRYSF |
| | | LFDGEEKYHFKNKSSVEIVKNDIFSQTPDNMIRNYKITLKIS |
| | | EKNPRVVEAEIEDLMNSTILKDGRRSARREKSMTERKLIEE |
| | | KVAENYSLLANCPIEEVDSIKIYKIKRFLTYRSNMLLYFASI |
| | | NSFLCEGIKGKDNETEEIWHLKDNDVRKEKVKENFKNKLI |
| | | QSTENYNSSLKNQIEEKEKLSSKEFKKGAFYRTIIKKLQQE |
| | | RIKELSEKSLTEDCEKIIKLYSELRHPLMHYDYQYFENLFE |
| | | NKENSELTKNLNLDIFKSLPLVRKMKLNNKVNYLEDNDTL |
| | | FVLQKTKKAKTLYQIYDALCEQKNGFNKFINDFFVSDGEE |
| | | NTVFKQIINEKFQSEMEFLEKRISESEKKNEKLKKKLDSMK |
| | | AHFRNINSEDTKEAYFWDIHSSRNYKTKYNERKNLVNEYT |
| | | KLLGSSKEKKLLREEITKINRQLLKLKQEMEEITKKNSLFR |
| | | LEYKMKIAFGFLFCEFDGNISKFKDEFDASNQEKIIQYHKN |
| | | GEKYLTSFLKEEEKEKFNLEKMQKIIQKTEEEDWLLPETKN |
| | | NLFKFYLLTYLLLPYELKGDFLGFVKKHYYDIKNVDFMDE |
| | | NQNNIQVSQTVEKQEDYFYHKIRLFEKNTKKYEIVKYSIVP |
| | | NEKLKQYFEDLGIDIKYLTGSVESGEKWLGENLGIDIKYLT |
| | | VEQKSEVSEEKNKKVSLKNNGMFNKTILLFVFKYYQIAFK |
| | | LFNDIELYSLFFLREKSEKPFEVFLEELKDKMIGKQLNFGQ |
| | | LLYVVYEVLVKNKDLDKILSKKIDYRKDKSFSPEIAYLRNF |
| | | LSHLNYSKFLDNFMKINTNKSDENKEVLIPSIKIQKMIQFIE |
| | | KCNLQNQIDFDFNFVNDFYMRKEKMFFIQLKQIFPDINSTE |
| | | KQKKSEKEEILRKRYHLINKKNEQIKDEHEAQSQLYEKILS |
| | | LQKIFSCDKNNFYRRLKEEKLLFLEKQGKKKISMKEIKDKI |
| | | ASDISDLLGILKKEITRDIKDKLTEKFRYCEEKLLNISFYNH |
| | | QDKKKEEGIRVFLIRDKNSDNFKFESILDDGSNKIFISKNGK |
| | | EITIQCCDKVLETLMIEKNTLKISSNGKIISLIPHYSYSIDVK |
| | | Y |

[0105] The DNA-activated programmable RNA nuclease can be Cas13. Sometimes the Cas13 can be Cas13a, Cas13b, Cas13c, Cas13d, or Cas13e. Sometimes Cas13a can also be also called C2c2. In some cases, the DNA-activated programmable RNA nuclease can be a type VI CRISPR-Cas system. In some cases, the DNA-activated programmable RNA nuclease can be from at least one of Leptotrichia shahii (Lsh), Listeria seeligeri (Lse), Leptotrichia buccalis (Lbu), Leptotrichia wadeu (Lwa), Rhodobacter capsulatus (Rca), Herbinix hemicellulosilytica (Hhe), Paludibacter propionicigenes (Ppr), Lachnospiraceae bacterium (Lba), [Eubacterium] rectale (Ere), Listeria newyorkensis (Lny), Clostridium aminophilum (Cam), Prevotella sp. (Psm), Capnocytophaga canimorsus (Cca, Lachnospiraceae bacterium (Lba), Bergeyella zoohelcum (Bzo), Prevotella intermedia (Pin), Prevotella buccae (Pbu), Alistipes sp. (Asp), Riemerella anatipestifer (Ran), Prevotella aurantiaca (Pau), Prevotella saccharolytica (Psa), Prevotella intermedia (Pin2), Capnocytophaga canimorsus (Cca), Porphyromonas gulae (Pgu), Prevotella sp. (Psp), Porphyromonas gingivalis (Pig), Prevotella intermedia (Pin3), Enterococcus italicus (Ei), Lactobacillus salivarius (Ls), or Thermus thermophilus (Tt). Sometimes the Cas13 is at least one of LbuCas13a, LwaCas13a, LbaCas13a, HheCas13a, PprCas13a, EreCas13a, CamCas13a, or LshCas13a. The trans cleavage activity of the CRISPR enzyme can be activated when the crRNA is complexed with the target nucleic acid. The trans cleavage activity of the CRISPR enzyme can be activated when the engineered guide nucleic acid comprising a tracrRNA and crRNA are complexed with the target nucleic acid. The target nucleic acid can be RNA or DNA.

[0106] The detection of the target nucleic acid is facilitated by a programmable nuclease. The programmable nuclease can become activated after binding of an engineered guide nucleic acid to a target nucleic, in which the activated programmable nuclease can cleave the target nucleic acid and can have trans cleavage activity. Trans cleavage activity can be non-specific cleavage of nearby single-stranded nucleic acids by the activated programmable nuclease, such as trans cleavage of detector nucleic acids with a detection moiety. Once the detector nucleic acid is cleaved by the activated programmable nuclease, the detection moiety is released from the detector nucleic acid and generates a detectable signal. Often the detection moiety is at least one of a fluorophore, a dye, a polypeptide, or a nucleic acid. Sometimes the detection moiety binds to a capture molecule on the support medium to be immobilized. The detectable signal can be visualized on the support medium to assess the presence or level of the target nucleic acid. A signal can be a calorimetric, potentiometric, amperometric, optical (e.g., fluorescent, colorometric, etc.), or piezo-electric signal. Often, the signal is present prior to detector nucleic acid cleavage and changes upon detector nucleic acid cleavage. Sometimes, the signal is absent prior to detector nucleic acid cleavage and is present upon detector nucleic acid cleavage. The detectable signal can be immobilized on a support medium for detection. The programmable nuclease can be a DNA-activated programmable RNA nuclease. The programmable nuclease can be a Type VI CRISPR enzyme that detects a target deoxyribonucleic acid. The programmable nuclease can be a Cas13 (e.g., Cas13a) tha detects a target deoxyribonucleic acid. The programmable nuclease can be a CRISPR-Cas (clustered regularly interspaced short palindromic repeats—CRISPR associated) nucleoprotein complex with trans cleavage activity, which can be activated by binding of an engineered guide nucleic acid with a target nucleic acid. The CRISPR-Cas nucleoprotein complex can comprise a Cas protein (also referred to as a Cas nuclease) complexed with an engineered guide nucleic acid, which can also be referred to as CRISPR enzyme. An engineered guide nucleic acid can be a CRISPR RNA (crRNA). Sometimes, an engineered guide nucleic acid comprises a crRNA and a trans-activating crRNA (tracrRNA). The CRISPR/Cas system used to detect a modified target nucleic acids can comprise CRISPR RNAs (crRNAs), trans-activating crRNAs (tracrRNAs), Cas proteins, and detector nucleic acids.

[0107] The programmable nucleases described herein are capable of being activated when complexed with the engineered guide nucleic acid and the target nucleic acid (e.g., DNA). A programmable nuclease can be capable of being activated when complexed with an engineered guide nucleic acid and the target deoxyribonucleotide. The programmable nuclease can be activated upon binding of the engineered guide nucleic acid to its target nucleic acid and degrades non-specifically nucleic acid in its environment. In some embodiments, an activated DNA-activated programmable RNA nuclease non-specifically degrades RNA in its environment (e.g., exhibits trans-collateral cleavage of RNA, such as RNA reporters). A DNA-activated programmable RNA nuclease can be a Cas protein (also referred to, interchangeably, as a Cas nuclease). A crRNA and Cas protein can form a CRISPR enzyme. In some embodiments, the DNA-activated programmable RNA nuclease is a Type VI CRISPR enzyme. In some embodiments, the DNA-activated programmable RNA nuclease is Cas13. Sometimes the Cas13 is Cas13a, Cas13b, Cas13c, Cas13d, or Cas13e. In some cases, the DNA-activated programmable RNA nuclease is from at least one of Leptotrichia shahii (Lsh), Listeria seeligeri (Lse), Leptotrichia buccalis (Lbu), Leptotrichia wadeu (Lwa), Rhodobacter capsulatus (Rca), Herbinix hemicellulosilytica (Hhe), Paludibacter propionicigenes (Ppr), Lachnospiraceae bacterium (Lba), [Eubacterium] rectale (Ere), Listeria newyorkensis (Lny), Clostridium aminophilum (Cam), Prevotella sp. (Psm), Capnocytophaga canimorsus (Cca, Lachnospiraceae bacterium (Lba), Bergeyella zoohelcum (Bzo), Prevotella intermedia (Pin), Prevotella buccae (Pbu), Alistipes sp. (Asp), Riemerella anatipestifer (Ran), Prevotella aurantiaca (Pau), Prevotella saccharolytica (Psa), Prevotella intermedia (Pin2), Capnocytophaga canimorsus (Cca), Porphyromonas gulae (Pgu), Prevotella sp. (Psp), Porphyromonas gingivalis (Pig), Prevotella intermedia (Pin3), Enterococcus italicus (Ei), Lactobacillus salivarius (Ls), or Thermus thermophilus (Tt). Sometimes the DNA-activated programmable RNA nuclease is at least one of LbuCas13a, LwaCas13a, LbaCas13a, HheCas13a, PprCas13a, EreCas13a, CamCas13a, or LshCas13a.

[0108] In some embodiments, a programmable nuclease is capable of being activated by a target RNA to initiate trans cleavage of an RNA reporter and is capable of being activated by a target DNA to initiate trans cleavage of an RNA reporter, such as a Type VI CRISPR protein (e.g., Cas13). For example, Cas13a of the present disclosure can be activated by a target RNA to initiate trans cleavage activity of the Cas13a for the cleavage of an RNA reporter and can be activated by a target DNA to initiate trans cleavage activity of the Cas13a for trans cleavage of an RNA reporter.

[0109] The trans cleavage activity of the DNA-activated programmable RNA nuclease can be activated when the crRNA is complexed with the target dexoyribonucleic acid. The trans cleavage activity of the DNA-activated programmable RNA nuclease can be activated when the engineered guide nucleic acid comprising a tracrRNA and crRNA are complexed with the target deoxyribonucleic acid. The target dexoyribonucleic acid can be a DNA or reverse transcribed RNA, or an amplicon thereof. Preferably, the target deoxyribonucleic acid is single-stranded DNA. Thus, a Cas13a nuclease of the present disclosure can be activated by a target DNA to initiate trans cleavage activity of the Cas13a nuclease that cleaves an RNA reporter. For example, Cas13a nucleases disclosed herein are activated by the binding of the engineered guide nucleic acid to a target DNA that was reverse transcribed from an RNA to transcollaterally cleave reporter molecules. For example, Cas13a nucleases disclosed herein are activated by the binding of the engineered guide nucleic acid to a target DNA that was amplified from a DNA to transcollaterally cleave reporter molecules. The reporter molecules can be RNA reporter molecules. In some embodiments, the Cas13a recognizes and detects ssDNA and, further, trans-cleaves RNA reporters. Multiple Cas13a isolates can recognize, be activated by, and detect target DNA as described herein, including ssDNA. For example, trans-collateral cleavage of RNA reporters can be activated in Lbu-Cas13a or Lwa-Cas13a by target DNA. Therefore, a DNA-activated programmable RNA nuclease can be used to detect target DNA by assaying for cleaved RNA reporters.

[0110] In some embodiments, the programmable nuclease may be present in the cleavage reaction at a concentration of about 10 nM, about 20 nM, about 30 nM, about 40 nM, about 50 nM, about 60 nM, about 70 nM, about 80 nM, about 90 nM, about 100 nM, about 200 nM, about 300 nM, about 400 nM, about 500 nM, about 600 nM, about 700 nM, about 800 nM, about 900 nM, about 1 μM, about 10 μM, or about 100 μM. In some embodiments, the programmable nuclease may be present in the cleavage reaction at a concentration of from 10 nM to 20 nM, from 20 nM to 30 nM, from 30 nM to 40 nM, from 40 nM to 50 nM, from 50 nM to 60 nM, from 60 nM to 70 nM, from 70 nM to 80 nM, from 80 nM to 90 nM, from 90 nM to 100 nM, from 100 nM to 200 nM, from 200 nM to 300 nM, from 300 nM to 400 nM, from 400 nM to 500 nM, from 500 nM to 600 nM, from 600 nM to 700 nM, from 700 nM to 800 nM, from 800 nM to 900 nM, from 900 nM to 1 μM, from 1 μM to 10 μM, from 10 μM to 100 μM, from 10 nM to 100 nM, from 10 nM to 1 μM, from 10 nM to 10 μM, from 10 nM to 100 μM, from 100 nM to 1 μM, from 100 nM to 10 μM, from 100 nM to 100 μM, or from 1 μM to 100 μM. In some embodiments, the programmable nuclease may be present in the cleavage reaction at a concentration of from 20 nM to 50 μM, from 50 nM to 20 μM, or from 200 nM to 5 μM.

[0111] A DNA-activated programmable RNA nuclease can be used to detect DNA at multiple pH values. A DNA-activated programmable RNA nuclease can be used to detect DNA at multiple pH values compared to an RNA-activated programmable RNA nuclease, such as a Cas13a complexed with a guide RNA that detects a target ribonucleic acid. For example, a Cas13 protein that detects a target RNA may exhibit high cleavage activity at pH values from 7.9 to 8.2. A Cas13 protein that detects a target DNA can exhibit consistent cleavage across a wide range of pH conditions, such as from a pH of 6.8 to a pH of 8.2. In some embodiments, Cas13 ssDNA detection may exhibit high cleavage activity at pH values from 6 to 6.5, from 6.1 to 6.6, from 6.2 to 6.7, from 6.3 to 6.8, from 6.4 to 6.9, from 6.5 to 7, from 6.6 to 7.1, from 6.7 to 7.2, from 6.8 to 7.3, from 6.9 to 7.4, from 7 to 7.5, from 7.1 to 7.6, from 7.2 to 7.7, from 7.3 to 7.8, from 7.4 to 7.9, from 7.5 to 8, from 7.6 to 8.1, from 7.7 to 8.2, from 7.8 to 8.3, from 7.9 to 8.4, from 8 to 8.5, from 8.1 to 8.6, from 8.2 to 8.7, from 8.3 to 8.8, from 8.4 to 8.9, from 8.5 to 9, from 6 to 8, from 6.5 to 8, or from 7 to 8.

[0112] In some embodiments, a programmable nuclease is capable of being activated by a target RNA to initiate trans cleavage of an RNA reporter and is capable of being activated by a target DNA to initiate trans cleavage of an RNA reporter, such as a Type VI CRISPR protein (e.g., Cas13). For example, Cas13a of the present disclosure can be activated by a target RNA to initiate trans cleavage activity of the Cas13a for the cleavage of an RNA reporter and can be activated by a target DNA to initiate trans cleavage activity of the Cas13a for trans cleavage of an RNA reporter. In some embodiments, target DNA binding preferences of a DNA-activated programmable RNA nuclease can be distinct from target RNA binding preferences of a RNA-activated programmable RNA nuclease. In some embodiments, target DNA binding preferences of an engineered guide nucleic acid complexed with a DNA-activated programmable RNA nuclease can be distinct from target RNA binding preferences of an engineered guide nucleic acid complexed with a RNA-activated programmable RNA nuclease. For example, guide RNA (gRNA) binding to a target DNA, and preferably a target ssDNA, may not necessarily correlate with the binding of the same gRNAs binding to a target RNA. For example, gRNAs can perform at a high level regardless of target nucleotide identity at a 3′ position in a sequence of a target RNA. In some embodiments, gRNAs can perform at a high level in the absence of a G at a 3′ position in a sequence of a target DNA. Furthermore, target DNA detected by a DNA-activated programmable RNA nuclease complexed with an engineered guide nucleic acid as disclosed herein can be directly from organisms, or can be indirectly generated by nucleic acid amplification methods, such as PCR and LAMP of DNA or reverse transcription of RNA. Key steps for the sensitive detection of direct DNA by a DNA-activated programmable RNA nuclease, such as a Cas13a, can include: (1) production or isolation of DNA to concentrations above about 0.1 nM per reaction for in vitro diagnostics, (2) selection of a target DNA with the appropriate sequence features to enable DNA detection as these some of these features are distinct from those required for target RNA detection, and (3) buffer composition that enhances DNA detection. The detection of DNA by a DNA-activated programmable RNA nuclease can be connected to a variety of readouts including fluorescence, lateral flow, electrochemistry, or any other readouts described herein. Multiplexing of a DNA-activated programmable RNA nuclease with a DNA-activated programmable DNA nuclease with RNA and DNA FQ-reporter molecules (each with a different color fluorophore), respectively, can enable detection of ssDNA or a combination of ssDNA and dsDNA, respectively. Multiplexing of different DNA-activated programmable RNA nuclease that have distinct RNA reporter cleavage preferences can enable additional multiplexing, such a first DNA-activated programmable RNA nuclease that preferentially cleaves uracil in an RNA reporter and a second DNA-activated programmable RNA nuclease that preferentially cleaves adenines in an RNA reporter. Methods for the generation of ssDNA for a DNA-activated programmable RNA nuclease-based detection or diagnostics can include (1) asymmetric PCR, (2) asymmetric isothermal amplification, such as RPA, LAMP, SDA, etc. (3) NEAR for the production of short ssDNA molecules, and (4) conversion of RNA targets into ssDNA by a reverse transcriptase followed by RNase H digestion. Thus, a DNA-activated programmable RNA nuclease detection of target DNA is compatible with the various systems, kits, compositions, reagents, and methods disclosed herein.

[0113] Cas13a DNA detection can be employed in a DETECTR assay disclosed herein to provide CRISPR diagnostics leveraging Type VI systems (e.g., Cas13) for the detection of a target DNA.

[0114] In some embodiments, the Type V CRISPR/Cas enzyme is a programmable Cas12 nuclease. Type V CRISPR/Cas enzymes (e.g., Cas12 or Cas14) lack an HNH domain. A Cas12 nuclease of the present disclosure cleaves a nucleic acids via a single catalytic RuvC domain. The RuvC domain is within a nuclease, or “NUC” lobe of the protein, and the Cas12 nucleases further comprise a recognition, or “REC” lobe. The REC and NUC lobes are connected by a bridge helix and the Cas12 proteins additionally include two domains for PAM recognition termed the PAM interacting (PI) domain and the wedge (WED) domain. (Murugan et al., Mol Cell. 2017 Oct. 5; 68(1): 15-25). A programmable Cas12 nuclease can be a Cas12a (also referred to as Cpf1) protein, a Cas12b protein, Cas12c protein, Cas12d protein, or a Cas12e protein. In some cases, a suitable Cas12 protein comprises an amino acid sequence having at least 80%, at least 85%, at least 90%, at least 95%, at least 98%, at least 99%, or 100%, amino acid sequence identity to any one of SEQ ID NO: 36-SEQ ID NO: 46.

TABLE 2
Cas12 Protein Sequences

| SEQ | | |
|---|---|---|
| ID NO | Description | Sequence |
| SEQ | Lachnospiraceae | MSKLEKFTNCYSLSKTLRFKAIPVGKTQENIDNKRLLVEDEKRAEDYK |
| ID | bacterium | GVKKLLDRYYLSFINDVLHSIKLKNLNNYISLFRKKTRTEKENKELENL |
| NO: | ND2006 | EINLRKEIAKAFKGNEGYKSLFKKDIIETILPEFLDDKDEIALVNSFNGFT |
| 36 | (LbCas12a) | TAFTGFFDNRENMFSEEAKSTSIAFRCINENLTRYISNMDIFEKVDAIFD |
| | | KHEVQEIKEKILNSDYDVEDFFEGEFFNFVLTQEGIDVYNAIIGGFVTES |
| | | GEKIKGLNEYINLYNQKTKQKLPKFKPLYKQVLSDRESLSFYGEGYTSD |
| | | EEVLEVFRNTLNKNSEIFSSIKKLEKLFKNFDEYSSAGIFVKNGPAISTIS |
| | | KDIFGEWNVIRDKWNAEYDDIHLKKKAVVTEKYEDDRRKSFKKIGSFS |
| | | LEQLQEYADADLSVVEKLKEIIIQKVDEIYKVYGSSEKLFDADFVLEKSL |
| | | KKNDAVVAIMKDLLDSVKSFENYIKAFFGEGKETNRDESFYGDFVLAY |
| | | DILLKVDHIYDAIRNYVTQKPYSKDKFKLYFQNPQFMGGWDKDKETD |
| | | YRATILRYGSKYYLAIMDKKYAKCLQKIDKDDVNGNYEKINYKLLPGP |
| | | NKMLPKVFFSKKWMAYYNPSEDIQKIYKNGTFKKGDMFNLNDCHKLI |
| | | DFFKDSISRYPKWSNAYDFNFSETEKYKDIAGFYREVEEQGYKVSFESA |
| | | SKKEVDKLVEEGKLYMFQIYNKDFSDKSHGTPNLHTMYFKLLFDENN |
| | | HGQIRLSGGAELFMRRASLKKEELVVHPANSPIANKNPDNPKKTTTLSY |
| | | DVYKDKRFSEDQYELHIPIAINKCPKNIFKINTEVRVLLKHDDNPYVIGI |
| | | DRGERNLLYIVVVDGKGNIVEQYSLNEIINNFNGIRIKTDYHSLLDKKEK |
| | | ERFEARQNWTSIENIKELKAGYISQVVHKICELVEKYDAVIALEDLNSG |
| | | FKNSRVKVEKQVYQKFEKMLIDKLNYMVDKKSNPCATGGALKGYQIT |
| | | NKFESFKSMSTQNGFIFYIPAWLTSKIDPSTGFVNLLKTKYTSIADSKKFI |
| | | SSFDRIMYVPEEDLFEFALDYKNFSRTDADYIKKWKLYSYGNRIRIFRN |
| | | PKKNNVFDWEEVCLTSAYKELFNKYGINYQQGDIRALLCEQSDKAFYS |
| | | SFMALMSLMLQMRNSITGRTDVDFLISPVKNSDGIFYDSRNYEAQENAI |
| | | LPKNADANGAYNIARKVLWAIGQFKKAEDEKLDKVKIAISNKEWLEY |
| | | AQTSVKH |
| SEQ | Acidaminococcus sp. | MTQFEGFTNLYQVSKTLRFELIPQGKTLKHIQEQGFIEEDKARNDHYKE |
| ID | BV316 | LKPIIDRIYKTYADQCLQLVQLDWENLSAAIDSYRKEKTEETRNALIEEQ |
| NO: | (AsCas12a) | ATYRNAIHDYFIGRTDNLTDAINKRHAEIYKGLFKAELFNGKVLKQLGT |
| 37 | | VTTTEHENALLRSFDKFTTYFSGFYENRKNVFSAEDISTAIPHRIVQDNF |
| | | PKFKENCHIFTRLITAVPSLREHFENVKKAIGIFVSTSIEEVFSFPFYNQLL |
| | | TQTQIDLYNQLLGGISREAGTEKIKGLNEVLNLAIQKNDETAHIIASLPH |
| | | RFIPLFKQILSDRNTLSFILEEFKSDEEVIQSFCKYKTLLRNENVLETAEA |
| | | LFNELNSIDLTHIFISHKKLETISSALCDHWDTLRNALYERRISELTGKIT |
| | | KSAKEKVQRSLKHEDINLQEIISAAGKELSEAFKQKTSEILSHAHAALDQ |
| | | PLPTTLKKQEEKEILKSQLDSLLGLYHLLDWFAVDESNEVDPEFSARLT |
| | | GIKLEMEPSLSFYNKARNYATKKPYSVEKFKLNFQMPTLASGWDVNKE |
| | | KNNGAILFVKNGLYYLGIMPKQKGRYKALSFEPTEKTSEGFDKMYYDY |
| | | FPDAAKMIPKCSTQLKAVTAHFQTHTTPILLSNNFIEPLEITKEIYDLNNP |
| | | EKEPKKFQTAYAKKTGDQKGYREALCKWIDFTRDFLSKYTKTTSIDLSS |
| | | LRPSSQYKDLGEYYAELNPLLYHISFQRIAEKEIMDAVETGKLYLFQIYN |
| | | KDFAKGHHGKPNLHTLYWTGLFSPENLAKTSIKLNGQAELFYRPKSRM |
| | | KRMAHRLGEKMLNKKLKDQKTPIPDTLYQELYDYVNHRLSHDLSDEA |
| | | RALLPNVITKEVSHEIIKDRRFTSDKFFFHVPITLNYQAANSPSKFNQRV |
| | | NAYLKEHPETPIIGIDRGERNLIYITVIDSTGKILEQRSLNTIQQFDYQKKL |
| | | DNREKERVAARQAWSVVGTIKDLKQGYLSQVIHEIVDLMIHYQAVVV |
| | | LENLNFGFKSKRTGIAEKAVYQQFEKMLIDKLNCLVLKDYPAEKVGGV |
| | | LNPYQLTDQFTSFAKMGTQSGFLFYVPAPYTSKIDPLTGFVDPFVWKTI |
| | | KNHESRKHFLEGFDFLHYDVKTGDFILHFKMNRNLSFQRGLPGFMPAW |
| | | DIVFEKNETQFDAKGTPFIAGKRIVPVIENHRFTGRYRDLYPANELIALL |
| | | EEKGIVFRDGSNILPKLLENDDSHAIDTMVALIRSVLQMRNSNAATGED |
| | | YINSPVRDLNGVCFDSRFQNPEWPMDADANGAYHIALKGQLLLNHLK |
| | | ESKDLKLQNGISNQDWLAYIQELRN |
| SEQ | Francisella | MSIYQEFVNKYSLSKTLRFELIPQGKTLENIKARGLILDDEKRAKDYKK |
| ID | novicida | AKQIIDKYHQFFIEEILSSVCISEDLLQNYSDVYFKLKKSDDDNLQKDFK |
| NO: | U112 | SAKDTIKKQISEYIKDSEKFKNLFNQNLIDAKKGQESDLILWLKQSKDN |
| 38 | (FnCas12a) | GIELFKANSDITDIDEALEIIKSFKGWTTYFKGFHENRKNVYSSNDIPTSII |
| | | YRIVDDNLPKFLENKAKYESLKDKAPEAINYEQIKKDLAEELTFDIDYK |
| | | TSEVNQRVFSLDEVFEIANFNNYLNQSGITKFNTIIGGKFVNGENTKRKG |
| | | INEYINLYSQQINDKTLKKYKMSVLFKQILSDTESKSFVIDKLEDDSDVV |
| | | TTMQSFYEQIAAFKTVEEKSIKETLSLLFDDLKAQKLDLSKIYFKNDKSL |
| | | TDLSQQVFDDYSVIGTAVLEYITQQIAPKNLDNPSKKEQELIAKKTEKA |
| | | KYLSLETIKLALEEFNKHRDIDKQCRFEEILANFAAIPMIFDEIAQNKDN |
| | | LAQISIKYQNQGKKDLLQASAEDDVKAIKDLLDQTNNLLHKLKIFHISQ |
| | | SEDKANILDKDEHFYLVFEECYFELANIVPLYNKIRNYITQKPYSDEKFK |
| | | LNFENSTLANGWDKNKEPDNTAILFIKDDKYYLGVMNKKNNKIFDDK |
| | | AIKENKGEGYKKIVYKLLPGANKMLPKVFFSAKSIKFYNPSEDILRIRNH |
| | | STHTKNGSPQKGYEKFEFNIEDCRKFIDFYKQSISKHPEWKDFGFRFSDT |
| | | QRYNSIDEFYREVENQGYKLTFENISESYIDSVVNQGKLYLFQIYNKDFS |
| | | AYSKGRPNLHTLYWKALFDERNLQDVVYKLNGEAELFYRKQSIPKKIT |
| | | HPAKEAIANKNKDNPKKESVFEYDLIKDKRFTEDKFFFHCPITINFKSSG |
| | | ANKFNDEINLLLKEKANDVHILSIDRGERHLAYYTLVDGKGNIIKQDTF |
| | | NIIGNDRMKTNYHDKLAAIEKDRDSARKDWKKINNIKEMKEGYLSQV |
| | | VHEIAKLVIEYNAIVVFEDLNFGFKRGRFKVEKQVYQKLEKMLIEKLNY |
| | | LVFKDNEFDKTGGVLRAYQLTAPFETFKKMGKQTGIIYYVPAGFTSKIC |
| | | PVTGFVNQLYPKYESVSKSQEFFSKFDKICYNLDKGYFEFSFDYKNFGD |
| | | KAAKGKWTIASFGSRLINFRNSDKNHNWDTREVYPTKELEKLLKDYSI |
| | | EYGHGECIKAAICGESDKKFFAKLTSVLNTILQMRNSKTGTELDYLISPV |
| | | ADVNGNFFDSRQAPKNMPQDADANGAYHIGLKGLMLLGRIKNNQEGK |
| | | KLNLVIKNEEYFEFVQNRNN |
| SEQ | Porphyromonas | MKTQHFFEDFTSLYSLSKTIRFELKPIGKTLENIKKNGLIRRDEQRLDDY |
| ID | macacae | EKLKKVIDEYHEDFIANILSSFSFSEEILQSYIQNLSESEARAKIEKTMRD |
| NO: | (PmCas12a) | TLAKAFSEDERYKSIFKKELVKKDIPVWCPAYKSLCKKFDNFTTSLVPF |
| 39 | | HENRKNLYTSNEITASIPYRIVHVNLPKFIQNIEALCELQKKMGADLYLE |
| | | MMENLRNVWPSFVKTPDDLCNLKTYNHLMVQSSISEYNRFVGGYSTE |
| | | DGTKHQGINEWINIYRQRNKEMRLPGLVFLHKQILAKVDSSSFISDTLE |
| | | NDDQVFCVLRQFRKLFWNTVSSKEDDAASLKDLFCGLSGYDPEAIYVS |
| | | DAHLATISKNIFDRWNYISDAIRRKTEVLMPRKKESVERYAEKISKQIKK |
| | | RQSYSLAELDDLLAHYSEESLPAGFSLLSYFTSLGGQKYLVSDGEVILY |
| | | EEGSNIWDEVLIAFRDLQVILDKDFTEKKLGKDEEAVSVIKKALDSALR |
| | | LRKFFDLLSGTGAEIRRDSSFYALYTDRMDKLKGLLKMYDKVRNYLTK |
| | | KPYSIEKFKLHFDNPSLLSGWDKNKELNNLSVIFRQNGYYYLGIMTPKG |
| | | KNLFKTLPKLGAEEMFYEKMEYKQIAEPMLMLPKVFFPKKTKPAFAPD |
| | | QSVVDIYNKKTFKTGQKGFNKKDLYRLIDFYKEALTVHEWKLFNFSFS |
| | | PTEQYRNIGEFFDEVREQAYKVSMVNVPASYIDEAVENGKLYLFQIYN |
| | | KDFSPYSKGIPNLHTLYWKALFSEQNQSRVYKLCGGGELFYRKASLHM |
| | | QDTTVHPKGISIHKKNLNKKGETSLFNYDLVKDKRFTEDKFFFHVPISIN |
| | | YKNKKITNVNQMVRDYIAQNDDLQIIGIDRGERNLLYISRIDTRGNLLE |
| | | QFSLNVIESDKGDLRTDYQKILGDREQERLRRRQEWKSIESIKDLKDGY |
| | | MSQVVHKICNMVVEHKAIVVLENLNLSFMKGRKKVEKSVYEKFERML |
| | | VDKLNYLVVDKKNLSNEPGGLYAAYQLTNPLFSFEELHRYPQSGILFFV |
| | | DPWNTSLTDPSTGFVNLLGRINYTNVGDARKFFDRFNAIRYDGKGNILF |
| | | DLDLSRFDVRVETQRKLWTLTTFGSRIAKSKKSGKWMVERIENLSLCFL |
| | | ELFEQFNIGYRVEKDLKKAILSQDRKEFYVRLIYLFNLMMQIRNSDGEE |
| | | DYILSPALNEKNLQFDSRLIEAKDLPVDADANGAYNVARKGLMVVQRI |
| | | KRGDHESIHRIGRAQWLRYVQEGIVE |
| SEQ | Moraxella | MLFQDFTHLYPLSKTVRFELKPIDRTLEHIHAKNFLSQDETMADMHQK |
| ID | bovoculi | VKVILDDYHRDFIADMMGEVKLTKLAEFYDVYLKFRKNPKDDELQKQ |
| NO: | 237 | LKDLQAVLRKEIVKPIGNGGKYKAGYDRLFGAKLFKDGKELGDLAKF |
| 40 | (MbCas12a) | VIAQEGESSPKLAHLAHFEKFSTYFTGFHDNRKNMYSDEDKHTAIAYR |
| | | LIHENLPRFIDNLQILTTIKQKHSALYDQIINELTASGLDVSLASHLDGYH |
| | | KLLTQEGITAYNTLLGGISGEAGSPKIQGINELINSHHNQHCHKSERIAK |
| | | LRPLHKQILSDGMSVSFLPSKFADDSEMCQAVNEFYRHYADVFAKVQS |
| | | LFDGFDDHQKDGIYVEHKNLNELSKQAFGDFALLGRVLDGYYVDVVN |
| | | PEFNERFAKAKTDNAKAKLTKEKDKFIKGVHSLASLEQAIEHYTARHD |
| | | DESVQAGKLGQYFKHGLAGVDNPIQKIHNNHSTIKGFLERERPAGERA |
| | | LPKIKSGKNPEMTQLRQLKELLDNALNVAHFAKLLTTKTTLDNQDGNF |
| | | YGEFGVLYDELAKIPTLYNKVRDYLSQKPFSTEKYKLNFGNPTLLNGW |
| | | DLNKEKDNFGVILQKDGCYYLALLDKAHKKVFDNAPNTGKSIYQKMI |
| | | YKYLEVRKQFPKVFFSKEAIAINYHPSKELVEIKDKGRQRSDDERLKLY |
| | | RFILECLKIHPKYDKKFEGAIGDIQLFKKDKKGREVPISEKDLFDKINGIF |
| | | SSKPKLEMEDFFIGEFKRYNPSQDLVDQYNIYKKIDSNDNRKKENFYNN |
| | | HPKFKKDLVRYYYESMCKHEEWEESFEFSKKLQDIGCYVDVNELFTEI |
| | | ETRRLNYKISFCNINADYIDELVEQGQLYLFQIYNKDFSPKAHGKPNLH |
| | | TLYFKALFSEDNLADPIYKLNGEAQIFYRKASLDMNETTIHRAGEVLEN |
| | | KNPDNPKKRQFVYDIIKDKRYTQDKFMLHVPITMNFGVQGMTIKEFNK |
| | | KVNQSIQQYDEVNVIGIDRGERHLLYLTVINSKGEILEQCSLNDITTASA |
| | | NGTQMTTPYHKILDKREIERLNARVGWGEIETIKELKSGYLSHVVHQIS |
| | | QLMLKYNAIVVLEDLNFGFKRGRFKVEKQIYQNFENALIKKLNHLVLK |
| | | DKADDEIGSYKNALQLTNNFTDLKSIGKQTGFLFYVPAWNTSKIDPETG |
| | | FVDLLKPRYENIAQSQAFFGKFDKICYNADKDYFEFHIDYAKFTDKAK |
| | | NSRQIWTICSHGDKRYVYDKTANQNKGAAKGINVNDELKSLFARHHIN |
| | | EKQPNLVMDICQNNDKEFHKSLMYLLKTLLALRYSNASSDEDFILSPVA |
| | | NDEGVFFNSALADDTQPQNADANGAYHIALKGLWLLNELKNSDDLNK |
| | | VKLAIDNQTWLNFAQNR |
| SEQ | Moraxella | MGIHGVPAALFQDFTHLYPLSKTVRFELKPIGRTLEHIHAKNFLSQDET |
| ID | bovoculi | MADMYQKVKVILDDYHRDFIADMMGEVKLTKLAEFYDVYLKFRKNP |
| NO: | AAX08_00205 | KDDGLQKQLKDLQAVLRKESVKPIGSGGKYKTGYDRLFGAKLFKDGK |
| 41 | (Mb2Cas12a) | ELGDLAKFVIAQEGESSPKLAHLAHFEKFSTYFTGFHDNRKNMYSDED |
| | | KHTAIAYRLIHENLPRFIDNLQILTTIKQKHSALYDQIINELTASGLDVSL |
| | | ASHLDGYHKLLTQEGITAYNRIIGEVNGYTNKHNQICHKSERIAKLRPL |
| | | HKQILSDGMGVSFLPSKFADDSEMCQAVNEFYRHYTDVFAKVQSLFDG |
| | | FDDHQKDGIYVEHKNLNELSKQAFGDFALLGRVLDGYYVDVVNPEFN |
| | | ERFAKAKTDNAKAKLTKEKDKFIKGVHSLASLEQAIEHHTARHDDESV |
| | | QAGKLGQYFKHGLAGVDNPIQKIHNNHSTIKGFLERERPAGERALPKIK |
| | | SGKNPEMTQLRQLKELLDNALNVAHFAKLLTTKTTLDNQDGNFYGEF |
| | | GVLYDELAKIPTLYNKVRDYLSQKPFSTEKYKLNFGNPTLLNGWDLNK |
| | | EKDNFGVILQKDGCYYLALLDKAHKKVFDNAPNTGKNVYQKMVYKL |
| | | LPGPNKMLPKVFFAKSNLDYYNPSAELLDKYAKGTHKKGDNFNLKDC |
| | | HALIDFFKAGINKHPEWQHFGFKFSPTSSYRDLSDFYREVEPQGYQVKF |
| | | VDINADYIDELVEQGKLYLFQIYNKDFSPKAHGKPNLHTLYFKALFSED |
| | | NLADPIYKLNGEAQIFYRKASLDMNETTIHRAGEVLENKNPDNPKKRQ |
| | | FVYDIIKDKRYTQDKFMLHVPITMNFGVQGMTIKEFNKKVNQSIQQYD |
| | | EVNVIGIDRGERHLLYLTVINSKGEILEQRSLNDITTASANGTQVTTPYH |
| | | KILDKREIERLNARVGWGEIETIKELKSGYLSHVVHQINQLMLKYNAIV |
| | | VLEDLNFGFKRGRFKVEKQIYQNFENALIKKLNHLVLKDKADDEIGSY |
| | | KNALQLTNNFTDLKSIGKQTGFLFYVPAWNTSKIDPETGFVDLLKPRYE |
| | | NIAQSQAFFGKFDKICYNTDKGYFEFHIDYAKFTDKAKNSRQKWAICS |
| | | HGDKRYVYDKTANQNKGAAKGINVNDELKSLFARYHINDKQPNLVM |
| | | DICQNNDKEFHKSLMCLLKTLLALRYSNASSDEDFILSPVANDEGVFFN |
| | | SALADDTQPQNADANGAYHIALKGLWLLNELKNSDDLNKVKLAIDNQ |
| | | TWLNFAQNR |
| SEQ | Moraxella | MGIHGVPAALFQDFTHLYPLSKTVRFELKPIGKTLEHIHAKNFLNQDET |
| ID | bovoculi | MADMYQKVKAILDDYHRDFIADMMGEVKLTKLAEFYDVYLKFRKNP |
| NO: | AAX11_00205 | KDDGLQKQLKDLQAVLRKEIVKPIGNGGKYKAGYDRLFGAKLFKDGK |
| 42 | (Mb3Cas12a) | ELGDLAKFVIAQEGESSPKLAHLAHFEKFSTYFTGFHDNRKNMYSDED |
| | | KHTAIAYRLIHENLPRFIDNLQILATIKQKHSALYDQIINELTASGLDVSL |
| | | ASHLDGYHKLLTQEGITAYNTLLGGISGEAGSRKIQGINELINSHHNQH |
| | | CHKSERIAKLRPLHKQILSDGMGVSFLPSKFADDSEVCQAVNEFYRHY |
| | | ADVFAKVQSLFDGFDDYQKDGIYVEYKNLNELSKQAFGDFALLGRVL |
| | | DGYYVDVVNPEFNERFAKAKTDNAKAKLTKEKDKFIKGVHSLASLEQ |
| | | AIEHYTARHDDESVQAGKLGQYFKHGLAGVDNPIQKIHNNHSTIKGFL |
| | | ERERPAGERALPKIKSDKSPEIRQLKELLDNALNVAHFAKLLTTKTTLH |
| | | NQDGNFYGEFGALYDELAKIATLYNKVRDYLSQKPFSTEKYKLNFGNP |
| | | TLLNGWDLNKEKDNFGVILQKDGCYYLALLDKAHKKVFDNAPNTGKS |
| | | VYQKMIYKLLPGPNKMLPKVFFAKSNLDYYNPSAELLDKYAQGTHKK |
| | | GDNFNLKDCHALIDFFKAGINKHPEWQHFGFKFSPTSSYQDLSDFYREV |
| | | EPQGYQVKFVDINADYINELVEQGQLYLFQIYNKDFSPKAHGKPNLHT |
| | | LYFKALFSEDNLVNPIYKLNGEAEIFYRKASLDMNETTIHRAGEVLENK |
| | | NPDNPKKRQFVYDIIKDKRYTQDKFMLHVPITMNFGVQGMTIKEFNKK |
| | | VNQSIQQYDEVNVIGIDRGERHLLYLTVINSKGEILEQRSLNDITTASAN |
| | | GTQMTTPYHKILDKREIERLNARVGWGEIETIKELKSGYLSHVVHQISQ |
| | | LMLKYNAIVVLEDLNFGFKRGRFKVEKQIYQNFENALIKKLNHLVLKD |
| | | KADDEIGSYKNALQLTNNFTDLKSIGKQTGFLFYVPAWNTSKIDPETGF |
| | | VDLLKPRYENIAQSQAFFGKFDKICYNADRGYFEFHIDYAKFNDKAKN |
| | | SRQIWKICSHGDKRYVYDKTANQNKGATIGVNVNDELKSLFTRYHIND |
| | | KQPNLVMDICQNNDKEFHKSLMYLLKTLLALRYSNASSDEDFILSPVA |
| | | NDEGVFFNSALADDTQPQNADANGAYHIALKGLWLLNELKNSDDLNK |
| | | VKLAIDNQTWLNFAQNR |
| SEQ | Thiomicrospira | MGIHGVPAATKTFDSEFFNLYSLQKTVRFELKPVGETASFVEDFKNEGL |
| ID | sp. XS5 | KRVVSEDERRAVDYQKVKEIIDDYHRDFIEESLNYFPEQVSKDALEQAF |
| NO: | (TsCas12a) | HLYQKLKAAKVEEREKALKEWEALQKKLREKVVKCFSDSNKARFSRI |
| 43 | | DKKELIKEDLINWLVAQNREDDIPTVETFNNFTTYFTGFHENRKNIYSK |
| | | DDHATAISFRLIHENLPKFFDNVISFNKLKEGFPELKFDKVKEDLEVDYD |
| | | LKHAFEIEYFVNFVTQAGIDQYNYLLGGKTLEDGTKKQGMNEQINLFK |
| | | QQQTRDKARQIPKLIPLFKQILSERTESQSFIPKQFESDQELFDSLQKLHN |
| | | NCQDKFTVLQQAILGLAEADLKKVFIKTSDLNALSNTIFGNYSVFSDAL |
| | | NLYKESLKTKKAQEAFEKLPAHSIHDLIQYLEQFNSSLDAEKQQSTDTV |
| | | LNYFIKTDELYSRFIKSTSEAFTQVQPLFELEALSSKRRPPESEDEGAKG |
| | | QEGFEQIKRIKAYLDTLMEAVHFAKPLYLVKGRKMIEGLDKDQSFYEA |
| | | FEMAYQELESLIIPIYNKARSYLSRKPFKADKFKINFDNNTLLSGWDAN |
| | | KETANASILFKKDGLYYLGIMPKGKTFLFDYFVSSEDSEKLKQRRQKTA |
| | | EEALAQDGESYFEKIRYKLLPGASKMLPKVFFSNKNIGFYNPSDDILRIR |
| | | NTASHTKNGTPQKGHSKVEFNLNDCHKMIDFFKSSIQKHPEWGSFGFTF |
| | | SDTSDFEDMSAFYREVENQGYVISFDKIKETYIQSQVEQGNLYLFQIYN |
| | | KDFSPYSKGKPNLHTLYWKALFEEANLNNVVAKLNGEAEIFFRRHSIK |
| | | ASDKVVHPANQAIDNKNPHTEKTQSTFEYDLVKDKRYTQDKFFFHVPI |
| | | SLNFKAQGVSKFNDKVNGFLKGNPDVNIIGIDRGERHLLYFTVVNQKG |
| | | EILVQESLNTLMSDKGHVNDYQQKLDKKEQERDAARKSWTTVENIKE |
| | | LKEGYLSHVVHKLAHLIIKYNAIVCLEDLNFGFKRGRFKVEKQVYQKF |
| | | EKALIDKLNYLVFKEKELGEVGHYLTAYQLTAPFESFKKLGKQSGILFY |
| | | VPADYTSKIDPTTGFVNFLDLRYQSVEKAKQLLSDFNAIRFNSVQNYFE |
| | | FEIDYKKLTPKRKVGTQSKWVICTYGDVRYQNRRNQKGHWETEEVNV |
| | | TEKLKALFASDSKTTTVIDYANDDNLIDVILEQDKASFFKELLWLLKLT |
| | | MTLRHSKIKSEDDFILSPVKNEQGEFYDSRKAGEVWPKDADANGAYHI |
| | | ALKGLWNLQQINQWEKGKTLNLAIKNQDWFSFIQEKPYQE |
| SEQ | Butyrivibrio | MGIHGVPAAYYQNLTKKYPVSKTIRNELIPIGKTLENIRKNNILESDVKR |
| ID | sp. NC3005 | KQDYEHVKGIMDEYHKQLINEALDNYMLPSLNQAAEIYLKKHVDVED |
| NO: | (BsCas12a) | REEFKKTQDLLRREVTGRLKEHENYTKIGKKDILDLLEKLPSISEEDYN |
| 44 | | ALESFRNFYTYFTSYNKVRENLYSDEEKSSTVAYRLINENLPKFLDNIKS |
| | | YAFVKAAGVLADCIEEEEQDALFMVETFNMTLTQEGIDMYNYQIGKV |
| | | NSAINLYNQKNHKVEEFKKIPKMKVLYKQILSDREEVFIGEFKDDETLL |
| | | SSIGAYGNVLMTYLKSEKINIFFDALRESEGKNVYVKNDLSKTTMSNIV |
| | | FGSWSAFDELLNQEYDLANENKKKDDKYFEKRQKELKKNKSYTLEQM |
| | | SNLSKEDISPIENYIERISEDIEKICIYNGEFEKIVVNEHDSSRKLSKNIKAV |
| | | KVIKDYLDSIKELEHDIKLINGSGQELEKNLVVYVGQEEALEQLRPVDS |
| | | LYNLTRNYLTKKPFSTEKVKLNFNKSTLLNGWDKNKETDNLGILFFKD |
| | | GKYYLGIMNTTANKAFVNPPAAKTENVFKKVDYKLLPGSNKMLPKVF |
| | | FAKSNIGYYNPSTELYSNYKKGTHKKGPSFSIDDCHNLIDFFKESIKKHE |
| | | DWSKFGFEFSDTADYRDISEFYREVEKQGYKLTFTDIDESYINDLIEKNE |
| | | LYLFQIYNKDFSEYSKGKLNLHTLYFMMLFDQRNLDNVVYKLNGEAE |
| | | VFYRPASIAENELVIHKAGEGIKNKNPNRAKVKETSTFSYDIVKDKRYS |
| | | KYKFTLHIPITMNFGVDEVRRFNDVINNALRTDDNVNVIGIDRGERNLL |
| | | YVVVINSEGKILEQISLNSIINKEYDIETNYHALLDEREDDRNKARKDW |
| | | NTIENIKELKTGYLSQVVNVVAKLVLKYNAIICLEDLNFGFKRGRQKVE |
| | | KQVYQKFEKMLIEKLNYLVIDKSREQVSPEKMGGALNALQLTSKFKSF |
| | | AELGKQSGIIYYVPAYLTSKIDPTTGFVNLFYIKYENIEKAKQFFDGFDFI |
| | | RFNKKDDMFEFSFDYKSFTQKACGIRSKWIVYTNGERIIKYPNPEKNNL |
| | | FDEKVINVTDEIKGLFKQYRIPYENGEDIKEIIISKAEADFYKRLFRLLHQ |
| | | TLQMRNSTSDGTRDYIISPVKNDRGEFFCSEFSEGTMPKDADANGAYNI |
| | | ARKGLWVLEQIRQKDEGEKVNLSMTNAEWLKYAQLHLL |
| SEQ | AacCas12b | MAVKSIKVKLRLDDMPEIRAGLWKLHKEVNAGVRYYTEWLSLLRQEN |
| ID | | LYRRSPNGDGEQECDKTAEECKAELLERLRARQVENGHRGPAGSDDEL |
| NO: | | LQLARQLYELLVPQAIGAKGDAQQIARKFLSPLADKDAVGGLGIAKAG |
| 45 | | NKPRWVRMREAGEPGWEEEKEKAETRKSADRTADVLRALADFGLKPL |
| | | MRVYTDSEMSSVEWKPLRKGQAVRTWDRDMFQQAIERMMSWESWN |
| | | QRVGQEYAKLVEQKNRFEQKNFVGQEHLVHLVNQLQQDMKEASPGL |
| | | ESKEQTAHYVTGRALRGSDKVFEKWGKLAPDAPFDLYDAEIKNVQRR |
| | | NTRRFGSHDLFAKLAEPEYQALWREDASFLTRYAVYNSILRKLNHAKM |
| | | FATFTLPDATAHPIWTRFDKLGGNLHQYTFLFNEFGERRHAIRFHKLLK |
| | | VENGVAREVDDVTVPISMSEQLDNLLPRDPNEPIALYFRDYGAEQHFT |
| | | GEFGGAKIQCRRDQLAHMHRRRGARDVYLNVSVRVQSQSEARGERRP |
| | | PYAAVFRLVGDNHRAFVHFDKLSDYLAEHPDDGKLGSEGLLSGLRVM |
| | | SVDLGLRTSASISVFRVARKDELKPNSKGRVPFFFPIKGNDNLVAVHER |
| | | SQLLKLPGETESKDLRAIREERQRTLRQLRTQLAYLRLLVRCGSEDVGR |
| | | RERSWAKLIEQPVDAANHMTPDWREAFENELQKLKSLHGICSDKEWM |
| | | DAVYESVRRVWRHMGKQVRDWRKDVRSGERPKIRGYAKDVVGGNSI |
| | | EQIEYLERQYKFLKSWSFFGKVSGQVIRAEKGSRFAITLREHIDHAKED |
| | | RLKKLADRIIMEALGYVYALDERGKGKWVAKYPPCQLILLEELSEYQF |
| | | NNDRPPSENNQLMQWSHRGVFQELINQAQVHDLLVGTMYAAFSSRFD |
| | | ARTGAPGIRCRRVPARCTQEHNPEPFPWWLNKFVVEHTLDACPLRADD |
| | | LIPTGEGEIFVSPFSAEEGDFHQIHADLNAAQNLQQRLWSDFDISQIRLR |
| | | CDWGEVDGELVLIPRLTGKRTADSYSNKVFYTNTGVTYYERERGKKR |
| | | RKVFAQEKLSEEEAELLVEADEAREKSVVLMRDPSGIINRGNWTRQKE |
| | | FWSMVNQRIEGYLVKQIRSRVPLQDSACENTGDI |
| SEQ | Cas12 | MKKIDNFVGCYPVSKTLRFKAIPIGKTQENIEKKRLVEEDEVRAK |
| ID | Variant | DYKAVKKLIDRYHREFIEGVLDNVKLDGLEEYYMLFNKSDREES |
| NO: | | DNKKIEIMEERFRRVISKSFKNNEEYKKIFSKKIIEEILPNYIKDEEE |
| 46 | | KELVKGFKGFYTAFVGYAQNRENMYSDEKKSTAISYRIVNENMP |
| | | RFITNIKVFEKAKSILDVDKINEINEYILNNDYYVDDFFNIDFFNYV |
| | | LNQKGIDIYNAIIGGIVTGDGRKIQGLNECINLYNQENKKIRLPQF |
| | | KPLYKQILSESESMSFYIDEIESDDMLIDMLKESLQIDSTINNAIDD |
| | | LKVLFNNIFDYDLSGIFINNGLPITTISNDVYGQWSTISDGWNERY |
| | | DVLSNAKDKESEKYFEKRRKEYKKVKSFSISDLQELGGKDLSICK |
| | | KINEIISEMIDDYKSKIEEIQYLFDIKELEKPLVTDLNKIELIKNSLD |
| | | GLKRIERYVIPFLGTGKEQNRDEVFYGYFIKCIDAIKEIDGVYNKT |
| | | RNYLTKKPYSKDKFKLYFENPQLMGGWDRNKESDYRSTLLRKN |
| | | GKYYVAIIDKSSSNCMMNIEEDENDNYEKINYKLLPGPNKMLPK |
| | | VFFSKKNREYFAPSKEIERIYSTGTFKKDTNFVKKDCENLITFYKD |
| | | SLDRHEDWSKSFDFSFKESSAYRDISEFYRDVEKQGYRVSFDLLS |
| | | SNAVNTLVEEGKLYLFQLYNKDFSEKSHGIPNLHTMYFRSLFDD |
| | | NNKGNIRLNGGAEMFMRRASLNKQDVTVHKANQPIKNKNLLNP |
| | | KKTTTLPYDVYKDKRFTEDQYEVHIPITMNKVPNNPYKINHMVR |
| | | EQLVKDDNPYVIGIDRGERNLIYVVVVDGQGHIVEQLSLNEIINE |
| | | NNGISIRTDYHTLLDAKERERDESRKQWKQIENIKELKEGYISQV |
| | | VHKICELVEKYDAVIALEDLNSGFKNSRVKVEKQVYQKFEKMLI |
| | | TKLNYMVDKKKDYNKPGGVLNGYQLTTQFESFSKMGTQNGIMF |
| | | YIPAWLTSKMDPTTGFVDLLKPKYKNKADAQKFFSQFDSIRYDN |
| | | QEDAFVFKVNYTKFPRTDADYNKEWEIYTNGERIRVFRNPKKNN |
| | | EYDYETVNVSERMKELFDSYDLLYDKGELKETICEMEESKFFEEL |
| | | IKLFRLTLQMRNSISGRTDVDYLISPVKNSNGYFYNSNDYKKEGA |
| | | KYPKDADANGAYNIARKVLWAIEQFKMADEDKLDKTKISIKNQ |
| | | EWLEYAQTHCE |

[0115] Alternatively, the Type V CRISPR/Cas enzyme is a programmable Cas14 nuclease. A Cas14 protein of the present disclosure includes 3 partial RuvC domains (RuvC-I, RuvC-II, and RuvC-III, also referred to herein as subdomains) that are not contiguous with respect to the primary amino acid sequence of the Cas14 protein, but form a RuvC domain once the protein is produced and folds. A naturally occurring Cas14 protein functions as an endonuclease that catalyzes cleavage at a specific sequence in a target nucleic acid. A programmable Cas14 nuclease can be a Cas114a protein, a Cas114b protein, a Cas114c protein, a Cas114d protein, a Cas14e protein, a Cas14f protein, a Cas14g protein, a Cas14h protein, or a Cas14u protein. In some cases, a suitable Cas14 protein comprises an amino acid sequence having at least 8000, at least 85%, at least 90%, at least 95%, at least 98%, at least 99%, or 10000, amino acid sequence identity to any one of SEQ ID NO: 47-SEQ ID NO: 138.

TABLE 3
Cas14 Protein Sequences

| SEQ | |
|---|---|
| ID NO | Sequence |
| SEQ | MEVQKTVMKTLSLRILRPLYSQEIEKEIKEEKERRKQAGGTGELDGGFYKKLEKKHSE |
| ID | MFSFDRLNLLLNQLQREIAKVYNHAISELYIATIAQGNKSNKHYISSIVYNRAYGYFYN |
| NO: | AYIALGICSKVEANFRSNELLTQQSALPTAKSDNFPIVLHKQKGAEGEDGGFRISTEGS |
| 47 | DLIFEIPIPFYEYNGENRKEPYKWVKKGGQKPVLKLILSTFRRQRNKGWAKDEGTDAE |
| | IRKVTEGKYQVSQIEINRGKKLGEHQKWFANFSIEQPIYERKPNRSIVGGLDVGIRSPLV |
| | CAINNSFSRYSVDSNDVFKFSKQVFAFRRRLLSKNSLKRKGHGAAHKLEPITEMTEKN |
| | DKFRKKIIERWAKEVTNFFVKNQVGIVQIEDLSTMKDREDHFFNQYLRGFWPYYQMQ |
| | TLIENKLKEYGIEVKRVQAKYTSQLCSNPNCRYWNNYFNFEYRKVNKFPKFKCEKCN |
| | LEISADYNAARNLSTPDIEKFVAKATKGINLPEK |
| SEQ | MEEAKTVSKTLSLRILRPLYSAEIEKEIKEEKERRKQGGKSGELDSGFYKKLEKKHTQ |
| ID | MFGWDKLNLMLSQLQRQIARVFNQSISELYIETVIQGKKSNKHYTSKIVYNRAYSVFY |
| NO: | NAYLALGITSKVEANFRSTELLMQKSSLPTAKSDNFPILLHKQKGVEGEEGGFKISADG |
| 48 | NDLIFEIPIPFYEYDSANKKEPFKWIKKGGQKPTIKLILSTFRRQRNKGWAKDEGTDAEI |
| | RKVIEGKYQVSHIEINRGKKLGDHQKWFVNFTIEQPIYERKLDKNIIGGIDVGIKSPLVC |
| | AVNNSFARYSVDSNDVLKFSKQAFAFRRRLLSKNSLKRSGHGSKNKLDPITRMTEKN |
| | DRFRKKIIERWAKEVTNFFIKNQVGTVQIEDLSTMKDRQDNFFNQYLRGFWPYYQMQ |
| | NLIENKLKEYGIETKRIKARYTSQLCSNPSCRHWNSYFSFDHRKTNNFPKFKCEKCALE |
| | ISADYNAARNISTPDIEKFVAKATKGINLPDKNENVILE |
| SEQ | MAKNTITKTLKLRIVRPYNSAEVEKIVADEKNNREKIALEKNKDKVKEACSKHLKVA |
| ID | AYCTTQVERNACLFCKARKLDDKFYQKLRGQFPDAVFWQEISEIFRQLQKQAAEIYN |
| NO: | QSLIELYYEIFIKGKGIANASSVEHYLSDVCYTRAAELFKNAAIASGLRSKIKSNFRLKE |
| 49 | LKNMKSGLPTTKSDNFPIPLVKQKGGQYTGFEISNHNSDFIIKIPFGRWQVKKEIDKYR |
| | PWEKFDFEQVQKSPKPISLLLSTQRRKRNKGWSKDEGTEAEIKKVMNGDYQTSYIEVK |
| | RGSKIGEKSAWMLNLSIDVPKIDKGVDPSIIGGIDVGVKSPLVCAINNAFSRYSISDNDL |
| | FHFNKKMFARRRILLKKNRHKRAGHGAKNKLKPITILTEKSERFRKKLIERWACEIADF |
| | FIKNKVGTVQMENLESMKRKEDSYFNIRLRGFWPYAEMQNKIEFKLKQYGIEIRKVAP |
| | NNTSKTCSKCGHLNNYFNFEYRKKNKFPHFKCEKCNFKENADYNAALNISNPKLKST |
| | KEEP |
| SEQ | MERQKVPQIRKIVRVVPLRILRPKYSDVIENALKKFKEKGDDTNTNDFWRAIRDRDTE |
| ID | FFRKELNFSEDEINQLERDTLFRVGLDNRVLFSYFDFLQEKLMKDYNKIISKLFINRQSK |
| NO: | SSFENDLTDEEVEELIEKDVTPFYGAYIGKGIKSVIKSNLGGKFIKSVKIDRETKKVTKL |
| 50 | TAINIGLMGLPVAKSDTFPIKIIKTNPDYITFQKSTKENLQKIEDYETGIEYGDLLVQITIP |
| | WFKNENKDFSLIKTKEAIEYYKLNGVGKKDLLNINLVLTTYHIRKKKSWQIDGSSQSL |
| | VREMANGELEEKWKSFFDTFIKKYGDEGKSALVKRRVNKKSRAKGEKGRELNLDERI |
| | KRLYDSIKAKSFPSEINLIPENYKWKLHFSIEIPPMVNDIDSNLYGGIDFGEQNIATLCVK |
| | NIEKDDYDFLTIYGNDLLKHAQASYARRRIMRVQDEYKARGHGKSRKTKAQEDYSER |
| | MQKLRQKITERLVKQISDFFLWRNKFHMAVCSLRYEDLNTLYKGESVKAKRMRQFIN |
| | KQQLFNGIERKLKDYNSEIYVNSRYPHYTSRLCSKCGKLNLYFDFLKFRTKNIIIRKNP |
| | DGSEIKYMPFFICEFCGWKQAGDKNASANIADKDYQDKLNKEKEFCNIRKPKSKKEDI |
| | GEENEEERDYSRRFNRNSFIYNSLKKDNKLNQEKLFDEWKNQLKRKIDGRNKFEPKE |
| | YKDRFSYLFAYYQEIIKNESES |
| SEQ | MVPTELITKTLQLRVIRPLYFEEIEKELAELKEQKEKEFEETNSLLLESKKIDAKSLKKL |
| ID | KRKARSSAAVEFWKIAKEKYPDILTKPEMEFIFSEMQKMMARFYNKSMTNIFIEMNND |
| NO: | EKVNPLSLISKASTEANQVIKCSSISSGLNRKIAGSINKTKFKQVRDGLISLPTARTETFPI |
| 51 | SFYKSTANKDEIPISKINLPSEEEADLTITLPFPFFEIKKEKKGQKAYSYFNIIEKSGRSNN |
| | KIDLLLSTHRRQRRKGWKEEGGTSAEIRRLMEGEFDKEWEIYLGEAEKSEKAKNDLIK |
| | NMTRGKLSKDIKEQLEDIQVKYFSDNNVESWNDLSKEQKQELSKLRKKKVEELKDW |
| | KHVKEILKTRAKIGWVELKRGKRQRDRNKWFVNITITRPPFINKELDDTKFGGIDLGV |
| | KVPFVCAVHGSPARLIIKENEILQFNKMVSARNRQITKDSEQRKGRGKKNKFIKKEIFN |
| | ERNELFRKKIIERWANQIVKFFEDQKCATVQIENLESFDRTSYK |
| SEQ | MKSDTKDKKIIIHQTKTLSLRIVKPQSIPMEEFTDLVRYHQMIIFPVYNNGAIDLYKKLF |
| ID | KAKIQKGNEARAIKYFMNKIVYAPIANTVKNSYIALGYSTKMQSSFSGKRLWDLRFGE |
| NO: | ATPPTIKADFPLPFYNQSGFKVSSENGEFIIGIPFGQYTKKTVSDIEKKTSFAWDKFTLED |
| 52 | TTKKTLIELLLSTKTRKMNEGWKNNEGTEAEIKRVMDGTYQVTSLEILQRDDSWFVN |
| | FNIAYDSLKKQPDRDKIAGIHMGITRPLTAVIYNNKYRALSIYPNTVMHLTQKQLARIK |
| | EQRTNSKYATGGHGRNAKVTGTDTLSEAYRQRRKKIIEDWIASIVKFAINNEIGTIYLE |
| | DISNTNSFFAAREQKLIYLEDISNTNSFLSTYKYPISAISDTLQHKLEEKAIQVIRKKAYY |
| | VNQICSLCGHYNKGFTYQFRRKNKFPKMKCQGCLEATSTEFNAAANVANPDYEKLLI |
| | KHGLLQLKK |
| SEQ | MSTITRQVRLSPTPEQSRLLMAHCQQYISTVNVLVAAFDSEVLTGKVSTKDFRAALPS |
| ID | AVKNQALRDAQSVFKRSVELGCLPVLKKPHCQWNNQNWRVEGDQLILPICKDGKTQ |
| NO: | QERFRCAAVALEGKAGILRIKKKRGKWIADLTVTQEDAPESSGSAIMGVDLGIKVPAV |
| 53 | AHIGGKGTRFFGNGRSQRSMRRRFYARRKTLQKAKKLRAVRKSKGKEARWMKTINH |
| | QLSRQIVNHAHALGVGTIKIEALQGIRKGTTRKSRGAAARKNNRMTNTWSFSQLTLFI |
| | TYKAQRQGITVEQVDPAYTSQDCPACRARNGAQDRTYVCSECGWRGHRDTVGAINIS |
| | RRAGLSGHRRGATGA |
| SEQ | MIAQKTIKIKLNPTKEQIIKLNSIIEEYIKVSNFTAKKIAEIQESFTDSGLTQGTCSECGKE |
| ID | KTYRKYHLLKKDNKLFCITCYKRKYSQFTLQKVEFQNKTGLRNVAKLPKTYYTNAIR |
| NO: | FASDTFSGFDEIIKKKQNRLNSIQNRLNFWKELLYNPSNRNEIKIKVVKYAPKTDTREH |
| 54 | PHYYSEAEIKGRIKRLEKQLKKFKMPKYPEFTSETISLQRELYSWKNPDELKISSITDKN |
| | ESMNYYGKEYLKRYIDLINSQTPQILLEKENNSFYLCFPITKNIEMPKIDDTFEPVGIDW |
| | GITRNIAVVSILDSKTKKPKFVKFYSAGYILGKRKHYKSLRKHFGQKKRQDKINKLGT |
| | KEDRFIDSNIHKLAFLIVKEIRNHSNKPIILMENITDNREEAEKSMRQNILLHSVKSRLQ |
| | NYIAYKALWNNIPTNLVKPEHTSQICNRCGHQDRENRPKGSKLFKCVKCNYMSNADF |
| | NASINIARKFYIGEYEPFYKDNEKMKSGVNSISM |
| SEQ | LKLSEQENITTGVKFKLKLDKETSEGLNDYFDEYGKAINFAIKVIQKELAEDRFAGKVR |
| ID | LDENKKPLLNEDGKKIWDFPNEFCSCGKQVNRYVNGKSLCQECYKNKFTEYGIRKRM |
| NO: | YSAKGRKAEQDINIKNSTNKISKTHFNYAIREAFILDKSIKKQRKERFRRLREMKKKLQ |
| 55 | EFIEIRDGNKILCPKIEKQRVERYIHPSWINKEKKLEDFRGYSMSNVLGKIKILDRNIKRE |
| | EKSLKEKGQINFKARRLMLDKSVKFLNDNKISFTISKNLPKEYELDLPEKEKRLNWLK |
| | EKIKIIKNQKPKYAYLLRKDDNFYLQYTLETEFNLKEDYSGIVGIDRGVSHIAVYTFVH |
| | NNGKNERPLFLNSSEILRLKNLQKERDRFLRRKHNKKRKKSNMRNIEKKIQLILHNYS |
| | KQIVDFAKNKNAFIVFEKLEKPKKNRSKMSKKSQYKLSQFTFKKLSDLVDYKAKREGI |
| | KVLYISPEYTSKECSHCGEKVNTQRPFNGNSSLFKCNKCGVELNADYNASINIAKKGL |
| | NILNSTN |
| SEQ | MEESIITGVKFKLRIDKETTKKLNEYFDEYGKAINFAVKIIQKELADDRFAGKAKLDQN |
| ID | KNPILDENGKKIYEFPDEFCSCGKQVNKYVNNKPFCQECYKIRFTENGIRKRMYSAKG |
| NO: | RKAEHKINILNSTNKISKTHFNYAIREAFILDKSIKKQRKKRNERLRESKKRLQQFIDMR |
| 56 | DGKREICPTIKGQKVDRFIHPSWITKDKKLEDFRGYTLSIINSKIKILDRNIKREEKSLKE |
| | KGQIIFKAKRLMLDKSIRFVGDRKVLFTISKTLPKEYELDLPSKEKRLNWLKEKIEIIKN |
| | QKPKYAYLLRKNIESEKKPNYEYYLQYTLEIKPELKDFYDGAIGIDRGINHIAVCTFISN |
| | DGKVTPPKFFSSGEILRLKNLQKERDRFLLRKHNKNRKKGNMRVIENKINLILHRYSK |
| | QIVDMAKKLNASIVFEELGRIGKSRTKMKKSQRYKLSLFIFKKLSDLVDYKSRREGIRV |
| | TYVPPEYTSKECSHCGEKVNTQRPFNGNYSLFKCNKCGIQLNSDYNASINIAKKGLKIP |
| | NST |
| SEQ | LWTIVIGDFIEMPKQDLVTTGIKFKLDVDKETRKKLDDYFDEYGKAINFAVKIIQKNLK |
| ID | EDRFAGKIALGEDKKPLLDKDGKKIYNYPNESCSCGNQVRRYVNAKPFCVDCYKLKF |
| NO: | TENGIRKRMYSARGRKADSDINIKNSTNKISKTHFNYAIREGFILDKSLKKQRSKRIKKL |
| 57 | LELKRKLQEFIDIRQGQMVLCPKIKNQRVDKFIHPSWLKRDKKLEEFRGYSLSVVEGKI |
| | KIFNRNILREEDSLRQRGHVNFKANRIMLDKSVRFLDGGKVNFNLNKGLPKEYLLDLP |
| | KKENKLSWLNEKISLIKLQKPKYAYLLRREGSFFIQYTIENVPKTFSDYLGAIGIDRGIS |
| | HIAVCTFVSKNGVNKAPVFFSSGEILKLKSLQKQRDLFLRGKHNKIRKKSNMRNIDNKI |
| | NLILHKYSRNIVNLAKSEKAFIVFEKLEKIKKSRFKMSKSLQYKLSQFTFKKLSDLVEY |
| | KAKIEGIKVDYVPPEYTSKECSHCGEKVDTQRPFNGNSSLFKCNKCRVQLNADYNASI |
| | NIAKKSLNISN |
| SEQ | MSKTTISVKLKIIDLSSEKKEFLDNYFNEYAKATTFCQLRIRRLLRNTHWLGKKEKSSK |
| ID | KWIFESGICDLCGENKELVNEDRNSGEPAKICKRCYNGRYGNQMIRKLFVSTKKREVQ |
| NO: | ENMDIRRVAKLNNTHYHRIPEEAFDMIKAADTAEKRRKKNVEYDKKRQMEFIEMFND |
| 58 | EKKRAARPKKPNERETRYVHISKLESPSKGYTLNGIKRKIDGMGKKIERAEKGLSRKKI |
| | FGYQGNRIKLDSNWVRFDLAESEITIPSLFKEMKLRITGPTNVHSKSGQIYFAEWFERIN |
| | KQPNNYCYLIRKTSSNGKYEYYLQYTYEAEVEANKEYAGCLGVDIGCSKLAAAVYY |
| | DSKNKKAQKPIEIFTNPIKKIKMRREKLIKLLSRVKVRHRRRKLMQLSKTEPIIDYTCHK |
| | TARKIVEMANTAKAFISMENLETGIKQKQQARETKKQKFYRNMFLFRKLSKLIEYKAL |
| | LKGIKIVYVKPDYTSQTCSSCGADKEKTERPSQAIFRCLNPTCRYYQRDINADFNAAV |
| | NIAKKALNNTEVVTTLL |
| SEQ | MARAKNQPYQKLTTTTGIKFKLDLSEEEGKRFDEYFSEYAKAVNFCAKVIYQLRKNL |
| ID | KFAGKKELAAKEWKFEISNCDFCNKQKEIYYKNIANGQKVCKGCHRTNFSDNAIRKK |
| NO: | MIPVKGRKVESKFNIHNTTKKISGTHRHWAFEDAADIIESMDKQRKEKQKRLRREKRK |
| 59 | LSYFFELFGDPAKRYELPKVGKQRVPRYLHKIIDKDSLTKKRGYSLSYIKNKIKISERNI |
| | ERDEKSLRKASPIAFGARKIKMSKLDPKRAFDLENNVFKIPGKVIKGQYKFFGTNVAN |
| | EHGKKFYKDRISKILAGKPKYFYLLRKKVAESDGNPIFEYYVQWSIDTETPAITSYDNI |
| | LGIDAGITNLATTVLIPKNLSAEHCSHCGNNHVKPIFTKFFSGKELKAIKIKSRKQKYFL |
| | RGKHNKLVKIKRIRPIEQKVDGYCHVVSKQIVEMAKERNSCIALEKLEKPKKSKFRQR |
| | RREKYAVSMFVFKKLATFIKYKAAREGIEIIPVEPEGTSYTCSHCKNAQNNQRPYFKPN |
| | SKKSWTSMFKCGKCGIELNSDYNAAFNIAQKALNMTSA |
| SEQ | MDEKHFFCSYCNKELKISKNLINKISKGSIREDEAVSKAISIHNKKEHSLILGIKFKLFIE |
| ID | NKLDKKKLNEYFDNYSKAVTFAARIFDKIRSPYKFIGLKDKNTKKWTFPKAKCVFCLE |
| NO: | EKEVAYANEKDNSKICTECYLKEFGENGIRKKIYSTRGRKVEPKYNIFNSTKELSSTHY |
| 60 | NYAIRDAFQLLDALKKQRQKKLKSIFNQKLRLKEFEDIFSDPQKRIELSLKPHQREKRY |
| | IHLSKSGQESINRGYTLRFVRGKIKSLTRNIEREEKSLRKKTPIHFKGNRLMIFPAGIKFD |
| | FASNKVKISISKNLPNEFNFSGTNVKNEHGKSFFKSRIELIKTQKPKYAYVLRKIKREYS |
| | KLRNYEIEKIRLENPNADLCDFYLQYTIETESRNNEEINGIIGIDRGITNLACLVLLKKGD |
| | KKPSGVKFYKGNKILGMKIAYRKHLYLLKGKRNKLRKQRQIRAIEPKINLILHQISKDI |
| | VKIAKEKNFAIALEQLEKPKKARFAQRKKEKYKLALFTFKNLSTLIEYKSKREGIPVIY |
| | VPPEKTSQMCSHCAINGDEHVDTQRPYKKPNAQKPSYSLFKCNKCGIELNADYNAAF |
| | NIAQKGLKTLMLNHSH |
| SEQ | MLQTLLVKLDPSKEQYKMLYETMERFNEACNQIAETVFAIHSANKIEVQKTVYYPIRE |
| ID | KFGLSAQLTILAIRKVCEAYKRDKSIKPEFRLDGALVYDQRVLSWKGLDKVSLVTLQG |
| NO: | RQIIPIKFGDYQKARMDRIRGQADLILVKGVFYLCVVVEVSEESPYDPKGVLGVDLGIK |
| 61 | NLAVDSDGEVHSGEQTTNTRERLDSLKARLQSKGTKSAKRHLKKLSGRMAKFSKDV |
| | NHCISKKLVAKAKGTLMSIALEDLQGIRDRVTVRKAQRRNLHTWNFGLLRMFVDYK |
| | AKIAGVPLVFVDPRNTSRTCPSCGHVAKANRPTRDEFRCVSCGFAGAADHIAAMNIAF |
| | RAEVSQPIVTRFFVQSQAPSFRVG |
| SEQ | MDEEPDSAEPNLAPISVKLKLVKLDGEKLAALNDYFNEYAKAVNFCELKMQKIRKNL |
| ID | VNIRGTYLKEKKAWINQTGECCICKKIDELRCEDKNPDINGKICKKCYNGRYGNQMIR |
| NO: | KLFVSTNKRAVPKSLDIRKVARLHNTHYHRIPPEAADIIKAIETAERKRRNRILFDERRY |
| 62 | NELKDALENEEKRVARPKKPKEREVRYVPISKKDTPSKGYTMNALVRKVSGMAKKIE |
| | RAKRNLNKRKKIEYLGRRILLDKNWVRFDFDKSEISIPTMKEFFGEMRFEITGPSNVMS |
| | PNGREYFTKWFDRIKAQPDNYCYLLRKESEDETDFYLQYTWRPDAHPKKDYTGCLGI |
| | DIGGSKLASAVYFDADKNRAKQPIQIFSNPIGKWKTKRQKVIKVLSKAAVRHKTKKLE |
| | SLRNIEPRIDVHCHRIARKIVGMALAANAFISMENLEGGIREKQKAKETKKQKFSRNM |
| | FVFRKLSKLIEYKALMEGVKVVYIVPDYTSQLCSSCGTNNTKRPKQAIFMCQNTECRY |
| | FGKNINADFNAAINIAKKALNRKDIVRELS |
| SEQ | MEKNNSEQTSITTGIKFKLKLDKETKEKLNNYFDEYGKAINFAVRIIQMQLNDDRLAG |
| ID | KYKRDEKGKPILGEDGKKILEIPNDFCSCGNQVNHYVNGVSFCQECYKKRFSENGIRK |
| NO: | RMYSAKGRKAEQDINIKNSTNKISKTHFNYAIREAFNLDKSIKKQREKRFKKLKDMKR |
| 63 | KLQEFLEIRDGKRVICPKIEKQKVERYIHPSWINKEKKLEEFRGYSLSIVNSKIKSFDRNI |
| | QREEKSLKEKGQINFKAQRLMLDKSVKFLKDNKVSFTISKELPKTFELDLPKKEKKLN |
| | WLNEKLEIIKNQKPKYAYLLRKENNIFLQYTLDSIPEIHSEYSGAVGIDRGVSHIAVYTF |
| | LDKDGKNERPFFLSSSGILRLKNLQKERDKFLRKKHNKIRKKGNMRNIEQKINLILHEY |
| | SKQIVNFAKDKNAFIVFELLEKPKKSRERMSKKIQYKLSQFTFKKLSDLVDYKAKREGI |
| | KVIYVEPAYTSKDCSHCGERVNTQRPFNGNFSLFKCNKCGIVLNSDYNASLNIARKGL |
| | NISAN |
| SEQ | MAEEKFFFCEKCNKDIKIPKNYINKQGAEEKARAKHEHRVHALILGIKFKIYPKKEDIS |
| ID | KLNDYFDEYAKAVTFTAKIVDKLKAPFLFAGKRDKDTSKKKWVFPVDKCSFCKEKTE |
| NO: | INYRTKQGKNICNSCYLTEFGEQGLLEKIYATKGRKVSSSFNLFNSTKKLTGTHNNYV |
| 64 | VKESLQLLDALKKQRSKRLKKLSNTRRKLKQFEEMFEKEDKRFQLPLKEKQRELRFIH |
| | VSQKDRATEFKGYTMNKIKSKIKVLRRNIEREQRSLNRKSPVFFRGTRIRLSPSVQFDD |
| | KDNKIKLTLSKELPKEYSFSGLNVANEHGRKFFAEKLKLIKENKSKYAYLLRRQVNKN |
| | NKKPIYDYYLQYTVEFLPNIITNYNGILGIDRGINTLACIVLLENKKEKPSFVKFFSGKGI |
| | LNLKNKRRKQLYFLKGVHNKYRKQQKIRPIEPRIDQILHDISKQIIDLAKEKRVAISLEQ |
| | LEKPQKPKFRQSRKAKYKLSQFNFKTLSNYIDYKAKKEGIRVIYIAPEMTSQNCSRCA |
| | MKNDLHVNTQRPYKNTSSLFKCNKCGVELNADYNAAFNIAQKGLKILNS |
| SEQ | MISLKLKLLPDEEQKKLLDEMFWKWASICTRVGFGRADKEDLKPPKDAEGVWFSLTQ |
| ID | LNQANTDINDLREAMKHQKHRLEYEKNRLEAQRDDTQDALKNPDRREISTKRKDLFR |
| NO: | PKASVEKGFLKLKYHQERYWVRRLKEINKLIERKTKTLIKIEKGRIKFKATRITLHQGS |
| 65 | FKIRFGDKPAFLIKALSGKNQIDAPFVVVPEQPICGSVVNSKKYLDEITTNFLAYSVNA |
| | MLFGLSRSEEMLLKAKRPEKIKKKEEKLAKKQSAFENKKKELQKLLGRELTQQEEAII |
| | EETRNQFFQDFEVKITKQYSELLSKIANELKQKNDFLKVNKYPILLRKPLKKAKSKKIN |
| | NLSPSEWKYYLQFGVKPLLKQKSRRKSRNVLGIDRGLKHLLAVTVLEPDKKTFVWNK |
| | LYPNPITGWKWRRRKLLRSLKRLKRRIKSQKHETIHENQTRKKLKSLQGRIDDLLHNIS |
| | RKIVETAKEYDAVIVVEDLQSMRQHGRSKGNRLKTLNYALSLFDYANVMQLIKYKA |
| | GIEGIQIYDVKPAGTSQNCAYCLLAQRDSHEYKRSQENSKIGVCLNPNCQNHKKQIDA |
| | DLNAARVIASCYALKINDSQPFGTRKRFKKRTTN |
| SEQ | METLSLKLKLNPSKEQLLVLDKMFWKWASICTRLGLKKAEMSDLEPPKDAEGVWFS |
| ID | KTQLNQANTDVNDLRKAMQHQGKRIEYELDKVENRRNEIQEMLEKPDRRDISPNRKD |
| NO: | LFRPKAAVEKGYLKLKYHKLGYWSKELKTANKLIERKRKTLAKIDAGKMKFKPTRIS |
| 66 | LHTNSFRIKFGEEPKIALSTTSKHEKIELPLITSLQRPLKTSCAKKSKTYLDAAILNFLAY |
| | STNAALFGLSRSEEMLLKAKKPEKIEKRDRKLATKRESFDKKLKTLEKLLERKLSEKE |
| | KSVFKRKQTEFFDKFCITLDETYVEALHRIAEELVSKNKYLEIKKYPVLLRKPESRLRS |
| | KKLKNLKPEDWTYYIQFGFQPLLDTPKPIKTKTVLGIDRGVRHLLAVSIFDPRTKTFTF |
| | NRLYSNPIVDWKWRRRKLLRSIKRLKRRLKSEKHVHLHENQFKAKLRSLEGRIEDHFH |
| | NLSKEIVDLAKENNSVIVVENLGGMRQHGRGRGKWLKALNYALSHFDYAKVMQLIK |
| | YKAELAGVFVYDVAPAGTSINCAYCLLNDKDASNYTRGKVINGKKNTKIGECKTCKK |
| | EFDADLNAARVIALCYEKRLNDPQPFGTRKQFKPKKP |
| SEQ | MKALKLQLIPTRKQYKILDEMFWKWASLANRVSQKGESKETLAPKKDIQKIQFNATQ |
| ID | LNQIEKDIKDLRGAMKEQQKQKERLLLQIQERRSTISEMLNDDNNKERDPHRPLNFRP |
| NO: | KGWRKFHTSKHWVGELSKILRQEDRVKKTIERIVAGKISFKPKRIGIWSSNYKINFFKR |
| 67 | KISINPLNSKGFELTLMTEPTQDLIGKNGGKSVLNNKRYLDDSIKSLLMFALHSRFFGL |
| | NNTDTYLLGGKINPSLVKYYKKNQDMGEFGREIVEKFERKLKQEINEQQKKIIMSQIK |
| | EQYSNRDSAFNKDYLGLINEFSEVFNQRKSERAEYLLDSFEDKIKQIKQEIGESLNISDW |
| | DFLIDEAKKAYGYEEGFTEYVYSKRYLEILNKIVKAVLITDIYFDLRKYPILLRKPLDKI |
| | KKISNLKPDEWSYYIQFGYDSINPVQLMSTDKFLGIDRGLTHLLAYSVFDKEKKEFIIN |
| | QLEPNPIMGWKWKLRKVKRSLQHLERRIRAQKMVKLPENQMKKKLKSIEPKIEVHYH |
| | NISRKIVNLAKDYNASIVVESLEGGGLKQHGRKKNARNRSLNYALSLFDYGKIASLIK |
| | YKADLEGVPMYEVLPAYTSQQCAKCVLEKGSFVDPEIIGYVEDIGIKGSLLDSLFEGTE |
| | LSSIQVLKKIKNKIELSARDNHNKEINLILKYNFKGLVIVRGQDKEEIAEHPIKEINGKFA |
| | ILDFVYKRGKEKVGKKGNQKVRYTGNKKVGYCSKHGQVDADLNASRVIALCKYLDI |
| | NDPILFGEQRKSFK |
| SEQ | MVTRAIKLKLDPTKNQYKLLNEMFWKWASLANRFSQKGASKETLAPKDGTQKIQFN |
| ID | ATQLNQIKKDVDDLRGAMEKQGKQKERLLIQIQERLLTISEILRDDSKKEKDPHRPQNF |
| NO: | RPFGWRRFHTSAYWSSEASKLTRQVDRVRRTIERIKAGKINFKPKRIGLWSSTYKINFL |
| 68 | KKKINISPLKSKSFELDLITEPQQKIIGKEGGKSVANSKKYLDDSIKSLLIFAIKSRLFGLN |
| | NKDKPLFENIITPNLVRYHKKGQEQENFKKEVIKKFENKLKKEISQKQKEIIFSQIERQY |
| | ENRDATFSEDYLRAISEFSEIFNQRKKERAKELLNSFNEKIRQLKKEVNGNISEEDLKIL |
| | EVEAEKAYNYENGFIEWEYSEQFLGVLEKIARAVLISDNYFDLKKYPILIRKPTNKSKK |
| | ITNLKPEEWDYYIQFGYGLINSPMKIETKNFMGIDRGLTHLLAYSIFDRDSEKFTINQLE |
| | LNPIKGWKWKLRKVKRSLQHLERRMRAQKGVKLPENQMKKRLKSIEPKIESYYHNLS |
| | RKIVNLAKANNASIVVESLEGGGLKQHGRKKNSRHRALNYALSLFDYGKIASLIKYKS |
| | DLEGVPMYEVLPAYTSQQCAKCVLKKGSFVEPEIIGYIEEIGFKENLLTLLFEDTGLSSV |
| | QVLKKSKNKMTLSARDKEGKMVDLVLKYNFKGLVISQEKKKEEIVEFPIKEIDGKFAV |
| | LDSAYKRGKERISKKGNQKLVYTGNKKVGYCSVHGQVDADLNASRVIALCKYLGINE |
| | PIVFGEQRKSFK |
| SEQ | LDLITEPIQPHKSSSLRSKEFLEYQISDFLNFSLHSLFFGLASNEGPLVDFKIYDKIVIPKP |
| ID | EERFPKKESEEGKKLDSFDKRVEEYYSDKLEKKIERKLNTEEKNVIDREKTRIWGEVN |
| NO: | KLEEIRSIIDEINEIKKQKHISEKSKLLGEKWKKVNNIQETLLSQEYVSLISNLSDELTNK |
| 69 | KKELLAKKYSKFDDKIKKIKEDYGLEFDENTIKKEGEKAFLNPDKFSKYQFSSSYLKLI |
| | GEIARSLITYKGFLDLNKYPIIFRKPINKVKKIHNLEPDEWKYYIQFGYEQINNPKLETE |
| | NILGIDRGLTHILAYSVFEPRSSKFILNKLEPNPIEGWKWKLRKLRRSIQNLERRWRAQ |
| | DNVKLPENQMKKNLRSIEDKVENLYHNLSRKIVDLAKEKNACIVFEKLEGQGMKQHG |
| | RKKSDRLRGLNYKLSLFDYGKIAKLIKYKAEIEGIPIYRIDSAYTSQNCAKCVLESRRFA |
| | QPEEISCLDDFKEGDNLDKRILEGTGLVEAKIYKKLLKEKKEDFEIEEDIAMFDTKKVI |
| | KENKEKTVILDYVYTRRKEIIGTNHKKNIKGIAKYTGNTKIGYCMKHGQVDADLNAS |
| | RTIALCKNFDINNPEIWK |
| SEQ | MSDESLVSSEDKLAIKIKIVPNAEQAKMLDEMFKKWSSICNRISRGKEDIETLRPDEGK |
| ID | ELQFNSTQLNSATMDVSDLKKAMARQGERLEAEVSKLRGRYETIDASLRDPSRRHTN |
| NO: | PQKPSSFYPSDWDISGRLTPRFHTARHYSTELRKLKAKEDKMLKTINKIKNGKIVFKPK |
| 70 | RITLWPSSVNMAFKGSRLLLKPFANGFEMELPIVISPQKTADGKSQKASAEYMRNALL |
| | GLAGYSINQLLFGMNRSQKMLANAKKPEKVEKFLEQMKNKDANFDKKIKALEGKWL |
| | LDRKLKESEKSSIAVVRTKFFKSGKVELNEDYLKLLKHMANEILERDGFVNLNKYPILS |
| | RKPMKRYKQKNIDNLKPNMWKYYIQFGYEPIFERKASGKPKNIMGIDRGLTHLLAVA |
| | VFSPDQQKFLFNHLESNPIMHWKWKLRKIRRSIQHMERRIRAEKNKHIHEAQLKKRLG |
| | SIEEKTEQHYHIVSSKIINWAIEYEAAIVLESLSHMKQRGGKKSVRTRALNYALSLFDY |
| | EKVARLITYKARIRGIPVYDVLPGMTSKTCATCLLNGSQGAYVRGLETTKAAGKATK |
| | RKNMKIGKCMVCNSSENSMIDADLNAARVIAICKYKNLNDPQPAGSRKVFKRF |
| SEQ | MLALKLKIMPTEKQAEILDAMFWKWASICSRIAKMKKKVSVKENKKELSKKIPSNSDI |
| ID | WFSKTQLCQAEVDVGDHKKALKNFEKRQESLLDELKYKVKAINEVINDESKREIDPN |
| NO: | NPSKFRIKDSTKKGNLNSPKFFTLKKWQKILQENEKRIKKKESTIEKLKRGNIFFNPTKI |
| 71 | SLHEEEYSINFGSSKLLLNCFYKYNKKSGINSDQLENKFNEFQNGLNIICSPLQPIRGSSK |
| | RSFEFIRNSIINFLMYSLYAKLFGIPRSVKALMKSNKDENKLKLEEKLKKKKSSFNKTV |
| | KEFEKMIGRKLSDNESKILNDESKKFFEIIKSNNKYIPSEEYLKLLKDISEEIYNSNIDFKP |
| | YKYSILIRKPLSKFKSKKLYNLKPTDYKYYLQLSYEPFSKQLIATKTILGIDRGLKHLLA |
| | VSVFDPSQNKFVYNKLIKNPVFKWKKRYHDLKRSIRNRERRIRALTGVHIHENQLIKK |
| | LKSMKNKINVLYHNVSKNIVDLAKKYESTIVLERLENLKQHGRSKGKRYKKLNYVLS |
| | NFDYKKIESLISYKAKKEGVPVSNINPKYTSKTCAKCLLEVNQLSELKNEYNRDSKNS |
| | KIGICNIHGQIDADLNAARVIALCYSKNLNEPHFK |
| SEQ | VINLFGYKFALYPNKTQEELLNKHLGECGWLYNKAIEQNEYYKADSNIEEAQKKFELL |
| ID | PDKNSDEAKVLRGNISKDNYVYRTLVKKKKSEINVQIRKAVVLRPAETIRNLAKVKK |
| NO: | KGLSVGRLKFIPIREWDVLPFKQSDQIRLEENYLILEPYGRLKFKMHRPLLGKPKTFCIK |
| 72 | RTATDRWTISFSTEYDDSNMRKNDGGQVGIDVGLKTHLRLSNENPDEDPRYPNPKIW |
| | KRYDRRLTILQRRISKSKKLGKNRTRLRLRLSRLWEKIRNSRADLIQNETYEILSENKLI |
| | AIEDLNVKGMQEKKDKKGRKGRTRAQEKGLHRSISDAAFSEFRRVLEYKAKRFGSEV |
| | KPVSAIDSSKECHNCGNKKGMPLESRIYECPKCGLKIDRDLNSAKVILARATGVRPGS |
| | NARADTKISATAGASVQTEGTVSEDFRQQMETSDQKPMQGEGSKEPPMNPEHKSSGR |
| | GSKHVNIGCKNKVGLYNEDENSRSTEKQIMDENRSTTEDMVEIGALHSPVLTT |
| SEQ | MIASIDYEAVSQALIVFEFKAKGKDSQYQAIDEAIRSYRFIRNSCLRYWMDNKKVGKY |
| ID | DLNKYCKVLAKQYPFANKLNSQARQSAAECSWSAISRFYDNCKRKVSGKKGFPKFK |
| NO: | KHARSVEYKTSGWKLSENRKAITFTDKNGIGKLKLKGTYDLHFSQLEDMKRVRLVRR |
| 73 | ADGYYVQFCISVDVKVETEPTGKAIGLDVGIKYFLADSSGNTIENPQFYRKAEKKLNR |
| | ANRRKSKKYIRGVKPQSKNYHKARCRYARKHLRVSRQRKEYCKRVAYCVIHSNDVV |
| | AYEDLNVKGMVKNRHLAKSISDVAWSTFRHWLEYFAIKYGKLTIPVAPHNTSQNCSN |
| | CDKKVPKSLSTRTHICHHCGYSEDRDVNAAKNILKKALSTVGQTGSLKLGEIEPLLVL |
| | EQSCTRKFDL |
| SEQ | LAEENTLHLTLAMSLPLNDLPENRTRSELWRRQWLPQKKLSLLLGVNQSVRKAAADC |
| ID | LRWFEPYQELLWWEPTDPDGKKLLDKEGRPIKRTAGHMRVLRKLEEIAPFRGYQLGS |
| NO: | AVKNGLRHKVADLLLSYAKRKLDPQFTDKTSYPSIGDQFPIVWTGAFVCYEQSITGQL |
| 74 | YLYLPLFPRGSHQEDITNNYDPDRGPALQVFGEKEIARLSRSTSGLLLPLQFDKWGEAT |
| | FIRGENNPPTWKATHRRSDKKWLSEVLLREKDFQPKRVELLVRNGRIFVNVACEIPTK |
| | PLLEVENFMGVSFGLEHLVTVVVINRDGNVVHQRQEPARRYEKTYFARLERLRRRGG |
| | PFSQELETFHYRQVAQIVEEALRFKSVPAVEQVGNIPKGRYNPRLNLRLSYWPFGKLA |
| | DLTSYKAVKEGLPKPYSVYSATAKMLCSTCGAANKEGDQPISLKGPTVYCGNCGTRH |
| | NTGFNTALNLARRAQELFVKGVVAR |
| SEQ | MSQSLLKWHDMAGRDKDASRSLQKSAVEGVLLHLTASHRVALEMLEKSVSQTVAVT |
| ID | MEAAQQRLVIVLEDDPTKATSRKRVISADLQFTREEFGSLPNWAQKLASTCPEIATKY |
| NO: | ADKHINSIRIAWGVAKESTNGDAVEQKLQWQIRLLDVTMFLQQLVLQLADKALLEQI |
| 75 | PSSIRGGIGQEVAQQVTSHIQLLDSGTVLKAELPTISDRNSELARKQWEDAIQTVCTYA |
| | LPFSRERARILDPGKYAAEDPRGDRLINIDPMWARVLKGPTVKSLPLLFVSGSSIRIVKL |
| | TLPRKHAAGHKHTFTATYLVLPVSREWINSLPGTVQEKVQWWKKPDVLATQELLVG |
| | KGALKKSANTLVIPISAGKKRFFNHILPALQRGFPLQWQRIVGRSYRRPATHRKWFAQ |
| | LTIGYTNPSSLPEMALGIHFGMKDILWWALADKQGNILKDGSIPGNSILDFSLQEKGKI |
| | ERQQKAGKNVAGKKYGKSLLNATYRVVNGVLEFSKGISAEHASQPIGLGLETIRFVDK |
| | ASGSSPVNARHSNWNYGQLSGIFANKAGPAGFSVTEITLKKAQRDLSDAEQARVLAIE |
| | ATKRFASRIKRLATKRKDDTLFV |
| SEQ | VEPVEKERFYYRTYTFRLDGQPRTQNLTTQSGWGLLTKAVLDNTKHYWEIVHHARIA |
| ID | NQPIVFENPVIDEQGNPKLNKLGQPRFWKRPISDIVNQLRALFENQNPYQLGSSLIQGT |
| NO: | YWDVAENLASWYALNKEYLAGTATWGEPSFPEPHPLTEINQWMPLTFSSGKVVRLLK |
| 76 | NASGRYFIGLPILGENNPCYRMRTIEKLIPCDGKGRVTSGSLILFPLVGIYAQQHRRMTD |
| | ICESIRTEKGKLAWAQVSIDYVREVDKRRRMRRTRKSQGWIQGPWQEVFILRLVLAH |
| | KAPKLYKPRCFAGISLGPKTLASCVILDQDERVVEKQQWSGSELLSLIHQGEERLRSLR |
| | EQSKPTWNAAYRKQLKSLINTQVFTIVTFLRERGAAVRLESIARVRKSTPAPPVNFLLS |
| | HWAYRQITERLKDLAIRNGMPLTHSNGSYGVRFTCSQCGATNQGIKDPTKYKVDIESE |
| | TFLCSICSHREIAAVNTATNLAKQLLDE |
| SEQ | MNDTETSETLTSHRTVCAHLHVVGETGSLPRLVEAALAELITLNGRATQALLSLAKNG |
| ID | LVLRRDKEENLIAAELTLPCRKNKYADVAAKAGEPILATRINNKGKLVTKKWYGEGN |
| NO: | SYHIVRFTPETGMFTVRVFDRYAFDEELLHLHSEVVFGSDLPKGIKAKTDSLPANFLQA |
| 77 | VFTSFLELPFQGFPDIVVKPAMKQAAEQLLSYVQLEAGENQQAEYPDTNERDPELRLV |
| | EWQKSLHELSVRTEPFEFVRARDIDYYAETDRRGNRFVNITPEWTKFAESPFARRLPLK |
| | IPPEFCILLRRKTEGHAKIPNRIYLGLQIFDGVTPDSTLGVLATAEDGKLFWWHDHLDE |
| | FSNLEGKPEPKLKNKPQLLMVSLEYDREQRFEESVGGDRKICLVTLKETRNFRRGWN |
| | GRILGIHFQHNPVITWALMDHDAEVLEKGFIEGNAFLGKALDKQALNEYLQKGGKWV |
| | GDRSFGNKLKGITHTLASLIVRLAREKDAWIALEEISWVQKQSADSVANHEIVEQPHH |
| | SLTR |
| SEQ | MNDTETSETLTSHRTVCAHLHVVGETGSLPRLVEAALAELITLNGRATQALLSLAKNG |
| ID | LVLRRDKEENLIAAELTLPCRKNKYADVAAKAGEPILATRINNKGKLVTKKWYGEGN |
| NO: | SYHIVRFTPETGMFTVRVFDRYAFDEELLHLHSEVVFGSDLPKGIKAKTDSLPANFLQA |
| 78 | VFTSFLELPFQGFPDIVVKPAMKQAAEQLLSYVQLEAGENQQAEYPDTNERDPELRLV |
| | EWQKSLHELSVRTEPFEFVRARDIDYYAETDRRGNRFVNITPEWTKFAESPFARRLPLK |
| | IPPEFCILLRRKTEGHAKIPNRIYLGLQIFDGVTPDSTLGVLATAEDGKLFWWHDHLDE |
| | FSNLEGKPEPKLKNKPQLLMVSLEYDREQRFEESVGGDRKICLVTLKETRNFRRGRHG |
| | HTRTDRLPAGNTLWRADFATSAEVAAPKWNGRILGIHFQHNPVITWALMDHDAEVLE |
| | KGFIEGNAFLGKALDKQALNEYLQKGGKWVGDRSFGNKLKGITHTLASLIVRLAREK |
| | DAWIALEEISWVQKQSADSVANRRFSMWNYSRLATLIEWLGTDIATRDCGTAAPLAH |
| | KVSDYLTHFTCPECGACRKAGQKKEIADTVRAGDILTCRKCGFSGPIPDNFIAEFVAKK |
| | ALERMLKKKPV |
| SEQ | MAKRNFGEKSEALYRAVRFEVRPSKEELSILLAVSEVLRMLFNSALAERQQVFTEFIAS |
| ID | LYAELKSASVPEEISEIRKKLREAYKEHSISLFDQINALTARRVEDEAFASVTRNWQEE |
| NO: | TLDALDGAYKSFLSLRRKGDYDAHSPRSRDSGFFQKIPGRSGFKIGEGRIALSCGAGRK |
| 79 | LSFPIPDYQQGRLAETTKLKKFELYRDQPNLAKSGRFWISVVYELPKPEATTCQSEQVA |
| | FVALGASSIGVVSQRGEEVIALWRSDKHWVPKIEAVEERMKRRVKGSRGWLRLLNSG |
| | KRRMHMISSRQHVQDEREIVDYLVRNHGSHFVVTELVVRSKEGKLADSSKPERGGSL |
| | GLNWAAQNTGSLSRLVRQLEEKVKEHGGSVRKHKLTLTEAPPARGAENKLWMARKL |
| | RESFLKEV |
| SEQ | LAKNDEKELLYQSVKFEIYPDESKIRVLTRVSNILVLVWNSALGERRARFELYIAPLYE |
| ID | ELKKFPRKSAESNALRQKIREGYKEHIPTFFDQLKKLLTPMRKEDPALLGSVPRAYQEE |
| NO: | TLNTLNGSFVSFMTLRRNNDMDAKPPKGRAEDRFHEISGRSGFKIDGSEFVLSTKEQK |
| 80 | LRFPIPNYQLEKLKEAKQIKKFTLYQSRDRRFWISIAYEIELPDQRPFNPEEVIYIAFGAS |
| | SIGVISPEGEKVIDFWRPDKHWKPKIKEVENRMRSCKKGSRAWKKRAAARRKMYAM |
| | TQRQQKLNHREIVASLLRLGFHFVVTEYTVRSKPGKLADGSNPKRGGAPQGFNWSAQ |
| | NTGSFGEFILWLKQKVKEQGGTVQTFRLVLGQSERPEKRGRDNKIEMVRLLREKYLES |
| | QTIVV |
| SEQ | MAKGKKKEGKPLYRAVRFEIFPTSDQITLFLRVSKNLQQVWNEAWQERQSCYEQFFG |
| ID | SIYERIGQAKKRAQEAGFSEVWENEAKKGLNKKLRQQEISMQLVSEKESLLQELSIAF |
| NO: | QEHGVTLYDQINGLTARRIIGEFALIPRNWQEETLDSLDGSFKSFLALRKNGDPDAKPP |
| 81 | RQRVSENSFYKIPGRSGFKVSNGQIYLSFGKIGQTLTSVIPEFQLKRLETAIKLKKFELCR |
| | DERDMAKPGRFWISVAYEIPKPEKVPVVSKQITYLAIGASRLGVVSPKGEFCLNLPRSD |
| | YHWKPQINALQERLEGVVKGSRKWKKRMAACTRMFAKLGHQQKQHGQYEVVKKL |
| | LRHGVHFVVTELKVRSKPGALADASKSDRKGSPTGPNWSAQNTGNIARLIQKLTDKA |
| | SEHGGTVIKRNPPLLSLEERQLPDAQRKIFIAKKLREEFLADQK |
| SEQ | MAKREKKDDVVLRGTKMRIYPTDRQVTLMDMWRRRCISLWNLLLNLETAAYGAKN |
| ID | TRSKLGWRSIWARVVEENHAKALIVYQHGKCKKDGSFVLKRDGTVKHPPRERFPGDR |
| NO: | KILLGLFDALRHTLDKGAKCKCNVNQPYALTRAWLDETGHGARTADIIAWLKDFKGE |
| 82 | CDCTAISTAAKYCPAPPTAELLTKIKRAAPADDLPVDQAILLDLFGALRGGLKQKECD |
| | HTHARTVAYFEKHELAGRAEDILAWLIAHGGTCDCKIVEEAANHCPGPRLFIWEHELA |
| | MIMARLKAEPRTEWIGDLPSHAAQTVVKDLVKALQTMLKERAKAAAGDESARKTGF |
| | PKFKKQAYAAGSVYFPNTTMFFDVAAGRVQLPNGCGSMRCEIPRQLVAELLERNLKP |
| | GLVIGAQLGLLGGRIWRQGDRWYLSCQWERPQPTLLPKTGRTAGVKIAASIVFTTYD |
| | NRGQTKEYPMPPADKKLTAVHLVAGKQNSRALEAQKEKEKKLKARKERLRLGKLEK |
| | GHDPNALKPLKRPRVRRSKLFYKSAARLAACEAIERDRRDGFLHRVTNEIVHKFDAVS |
| | VQKMSVAPMMRRQKQKEKQIESKKNEAKKEDNGAAKKPRNLKPVRKLLRHVAMAR |
| | GRQFLEYKYNDLRGPGSVLIADRLEPEVQECSRCGTKNPQMKDGRRLLRCIGVLPDGT |
| | DCDAVLPRNRNAARNAEKRLRKHREAHNA |
| SEQ | MNEVLPIPAVGEDAADTIMRGSKMRIYPSVRQAATMDLWRRRCIQLWNLLLELEQAA |
| ID | YSGENRRTQIGWRSIWATVVEDSHAEAVRVAREGKKRKDGTFRKAPSGKEIPPLDPA |
| NO: | MLAKIQRQMNGAVDVDPKTGEVTPAQPRLFMWEHELQKIMARLKQAPRTHWIDDLP |
| 83 | SHAAQSVVKDLIKALQAMLRERKKRASGIGGRDTGFPKFKKNRYAAGSVYFANTQLR |
| | FEAKRGKAGDPDAVRGEFARVKLPNGVGWMECRMPRHINAAHAYAQATLMGGRIW |
| | RQGENWYLSCQWKMPKPAPLPRAGRTAAIKIAAAIPITTVDNRGQTREYAMPPIDRER |
| | IAAHAAAGRAQSRALEARKRRAKKREAYAKKRHAKKLERGIAAKPPGRARIKLSPGF |
| | YAAAAKLAKLEAEDANAREAWLHEITTQIVRNFDVIAVPRMEVAKLMKKPEPPEEKE |
| | EQVKAPWQGKRRSLKAARVMMRRTAMALIQTTLKYKAVDLRGPQAYEEIAPLDVTA |
| | AACSGCGVLKPEWKMARAKGREIMRCQEPLPGGKTCNTVLTYTRNSARVIGRELAVR |
| | LAERQKA |
| SEQ | MTTQKTYNFCFYDQRFFELSKEAGEVYSRSLEEFWKIYDETGVWLSKFDLQKHMRNK |
| ID | LERKLLHSDSFLGAMQQVHANLASWKQAKKVVPDACPPRKPKFLQAILFKKSQIKYK |
| NO: | NGFLRLTLGTEKEFLYLKWDINIPLPIYGSVTYSKTRGWKINLCLETEVEQKNLSENKY |
| 84 | LSIDLGVKRVATIFDGENTITLSGKKFMGLMHYRNKLNGKTQSRLSHKKKGSNNYKKI |
| | QRAKRKTTDRLLNIQKEMLHKYSSFIVNYAIRNDIGNIIIGDNSSTHDSPNMRGKTNQK |
| | ISQNPEQKLKNYIKYKFESISGRVDIVPEPYTSRKCPHCKNIKKSSPKGRTYKCKKCGFI |
| | FDRDGVGAINIYNENVSFGQIISPGRIRSLTEPIGMKFHNEIYFKSYVAA |
| SEQ | MSVRSFQARVECDKQTMEHLWRTHKVFNERLPEIIKILFKMKRGECGQNDKQKSLYK |
| ID | SISQSILEANAQNADYLLNSVSIKGWKPGTAKKYRNASFTWADDAAKLSSQGIHVYD |
| NO: | KKQVLGDLPGMMSQMVCRQSVEAISGHIELTKKWEKEHNEWLKEKEKWESEDEHK |
| 85 | KYLDLREKFEQFEQSIGGKITKRRGRWHLYLKWLSDNPDFAAWRGNKAVINPLSEKA |
| | QIRINKAKPNKKNSVERDEFFKANPEMKALDNLHGYYERNFVRRRKTKKNPDGFDHK |
| | PTFTLPHPTIHPRWFVFNKPKTNPEGYRKLILPKKAGDLGSLEMRLLTGEKNKGNYPD |
| | DWISVKFKADPRLSLIRPVKGRRVVRKGKEQGQTKETDSYEFFDKHLKKWRPAKLSG |
| | VKLIFPDKTPKAAYLYFTCDIPDEPLTETAKKIQWLETGDVTKKGKKRKKKVLPHGLV |
| | SCAVDLSMRRGTTGFATLCRYENGKIHILRSRNLWVGYKEGKGCHPYRWTEGPDLGH |
| | IAKHKREIRILRSKRGKPVKGEESHIDLQKHIDYMGEDRFKKAARTIVNFALNTENAAS |
| | KNGFYPRADVLLLENLEGLIPDAEKERGINRALAGWNRRHLVERVIEMAKDAGFKRR |
| | VFEIPPYGTSQVCSKCGALGRRYSIIRENNRREIRFGYVEKLFACPNCGYCANADHNAS |
| | VNLNRRFLIEDSFKSYYDWKRLSEKKQKEEIETIESKLMDKLCAMHKISRGSISK |
| SEQ | MHLWRTHCVFNQRLPALLKRLFAMRRGEVGGNEAQRQVYQRVAQFVLARDAKDSV |
| ID | DLLNAVSLRKRSANSAFKKKATISCNGQAREVTGEEVFAEAVALASKGVFAYDKDD |
| NO: | MRAGLPDSLFQPLTRDAVACMRSHEELVATWKKEYREWRDRKSEWEAEPEHALYLN |
| 86 | LRPKFEEGEAARGGRFRKRAERDHAYLDWLEANPQLAAWRRKAPPAVVPIDEAGKR |
| | RIARAKAWKQASVRAEEFWKRNPELHALHKIHVQYLREFVRPRRTRRNKRREGFKQR |
| | PTFTMPDPVRHPRWCLFNAPQTSPQGYRLLRLPQSRRTVGSVELRLLTGPSDGAGFPD |
| | AWVNVRFKADPRLAQLRPVKVPRTVTRGKNKGAKVEADGFRYYDDQLLIERDAQVS |
| | GVKLLFRDIRMAPFADKPIEDRLLSATPYLVFAVEIKDEARTERAKAIRFDETSELTKSG |
| | KKRKTLPAGLVSVAVDLDTRGVGFLTRAVIGVPEIQQTHHGVRLLQSRYVAVGQVEA |
| | RASGEAEWSPGPDLAHIARHKREIRRLRQLRGKPVKGERSHVRLQAHIDRMGEDRFK |
| | KAARKIVNEALRGSNPAAGDPYTRADVLLYESLETLLPDAERERGINRALLRWNRAK |
| | LIEHLKRMCDDAGIRHFPVSPFGTSQVCSKCGALGRRYSLARENGRAVIRFGWVERLF |
| | ACPNPECPGRRPDRPDRPFTCNSDHNASVNLHRVFALGDQAVAAFRALAPRDSPARTL |
| | AVKRVEDTLRPQLMRVHKLADAGVDSPF |
| SEQ | MATLVYRYGVRAHGSARQQDAVVSDPAMLEQLRLGHELRNALVGVQHRYEDGKRA |
| ID | VWSGFASVAAADHRVTTGETAVAELEKQARAEHSADRTAATRQGTAESLKAARAAV |
| NO: | KQARADRKAAMAAVAEQAKPKIQALGDDRDAEIKDLYRRFCQDGVLLPRCGRCAGD |
| 87 | LRSDGDCTDCGAAHEPRKLYWATYNAIREDHQTAVKLVEAKRKAGQPARLRFRRWT |
| | GDGTLTVQLQRMHGPACRCVTCAEKLTRRARKTDPQAPAVAADPAYPPTDPPRDPAL |
| | LASGQGKWRNVLQLGTWIPPGEWSAMSRAERRRVGRSHIGWQLGGGRQLTLPVQLH |
| | RQMPADADVAMAQLTRVRVGGRHRMSVALTAKLPDPPQVQGLPPVALHLGWRQRP |
| | DGSLRVATWACPQPLDLPPAVADVVVSHGGRWGEVIMPARWLADAEVPPRLLGRRD |
| | KAMEPVLEALADWLEAHTEACTARMTPALVRRWRSQGRLAGLTNRWRGQPPTGSA |
| | EILTYLEAWRIQDKLLWERESHLRRRLAARRDDAWRRVASWLARHAGVLVVDDADI |
| | AELRRRDDPADTDPTMPASAAQAARARAALAAPGRLRHLATITATRDGLGVHTVASA |
| | GLTRLHRKCGHQAQPDPRYAASAVVTCPGCGNGYDQDYNAAMLMLDRQQQP |
| SEQ | MSRVELHRAYKFRLYPTPAQVAELAEWERQLRRLYNLAHSQRLAAMQRHVRPKSPG |
| ID | VLKSECLSCGAVAVAEIGTDGKAKKTVKHAVGCSVLECRSCGGSPDAEGRTAHTAAC |
| NO: | SFVDYYRQGREMTQLLEEDDQLARVVCSARQETLRDLEKAWQRWHKMPGFGKPHF |
| 88 | KKRIDSCRIYFSTPKSWAVDLGYLSFTGVASSVGRIKIRQDRVWPGDAKFSSCHVVRD |
| | VDEWYAVFPLTFTKEIEKPKGGAVGINRGAVHAIADSTGRVVDSPKFYARSLGVIRHR |
| | ARLLDRKVPFGRAVKPSPTKYHGLPKADIDAAAARVNASPGRLVYEARARGSIAAAE |
| | AHLAALVLPAPRQTSQLPSEGRNRERARRFLALAHQRVRRQREWFLHNESAHYAQSY |
| | TKIAIEDWSTKEMTSSEPRDAEEMKRVTRARNRSILDVGWYELGRQIAYKSEATGAEF |
| | AKVDPGLRETETHVPEAIVRERDVDVSGMLRGEAGISGTCSRCGGLLRASASGHADA |
| | ECEVCLHVEVGDVNAAVNVLKRAMFPGAAPPSKEKAKVTIGIKGRKKKRAA |
| SEQ | MSRVELHRAYKFRLYPTPVQVAELSEWERQLRRLYNLGHEQRLLTLTRHLRPKSPGV |
| ID | LKGECLSCDSTQVQEVGADGRPKTTVRHAEQCPTLACRSCGALRDAEGRTAHTVACA |
| NO: | FVDYYRQGREMTELLAADDQLARVVCSARQEVLRDLDKAWQRWRKMPGFGKPRFK |
| 89 | RRTDSCRIYFSTPKAWKLEGGHLSFTGAATTVGAIKMRQDRNWPASVQFSSCHVVRD |
| | VDEWYAVFPLTFVAEVARPKGGAVGINRGAVHAIADSTGRVVDSPRYYARALGVIRH |
| | RARLFDRKVPSGHAVKPSPTKYRGLSAIEVDRVARATGFTPGRVVTEALNRGGVAYA |
| | ECALAAIAVLGHGPERPLTSDGRNREKARKFLALAHQRVRRQREWFLHNESAHYART |
| | YSKIAIEDWSTKEMTASEPQGEETRRVTRSRNRSILDVGWYELGRQLAYKTEATGAEF |
| | AQVDPGLKETETNVPKAIADARDVDVSGMLRGEAGISGTCSKCGGLLRAPASGHADA |
| | ECEICLNVEVGDVNAAVNVLKRAMFPGDAPPASGEKPKVSIGIKGRQKKKKAA |
| SEQ | MEAIATGMSPERRVELGILPGSVELKRAYKFRLYPMKVQQAELSEWERQLRRLYNLA |
| ID | HEQRLAALLRYRDWDFQKGACPSCRVAVPGVHTAACDHVDYFRQAREMTQLLEVD |
| NO: | AQLSRVICCARQEVLRDLDKAWQRWRKKLGGRPRFKRRTDSCRIYLSTPKHWEIAGR |
| 90 | YLRLSGLASSVGEIRIEQDRAFPEGALLSSCSIVRDVDEWYACLPLTFTQPIERAPHRSV |
| | GLNRGWHALADSDGRVVDSPKFFERALATVQKRSRDLARKVSGSRNAHKARIKLA |
| | KAHQRVRRQRAAFLHQESAYYSKGFDLVALEDMSVRKMTATAGEAPEMGRGAQRD |
| | LNRGILDVGWYELARQIDYKRLAHGGELLRVDPGQTTPLACVTEEQPARGISSACAVC |
| | GIPLARPASGNARMRCTACGSSQVGDVNAAENVLTRALSSAPSGPKSPKASIKIKGRQ |
| | KRLGTPANRAGEASGGDPPVRGPVEGGTLAYVVEPVSESQSDT |
| SEQ | MTVRTYKYRAYPTPEQAEALTSWLRFASQLYNAALEHRKNAWGRHDAHGRGFRFW |
| ID | DGDAAPRKKSDPPGRWVYRGGGGAHISKNDQGKLLTEFRREHAELLPPGMPALVQH |
| NO: | EVLARLERSMAAFFQRATKGQKAGYPRWRSEHRYDSLTFGLTSPSKERFDPETGESLG |
| 91 | RGKTVGAGTYHNGDLRLTGLGELRILEHRRIPMGAIPKSVIVRRSGKRWFVSIAMEMP |
| | SVEPAASGRPAVGLDMGVVTWGTAFTADTSAAAALVADLRRMATDPSDCRRLEELE |
| | REAAQLSEVLAHCRARGLDPARPRRCPKELTKLYRRSLHRLGELDRACARIRRRLQAA |
| | HDIAEPVPDEAGSAVLIEGSNAGMRHARRVARTQRRVARRTRAGHAHSNRRKKAVQ |
| | AYARAKERERSARGDHRHKVSRALVRQFEEISVEALDIKQLTVAPEHNPDPQPDLPAH |
| | VQRRRNRGELDAAWGAFFAALDYKAADAGGRVARKPAPHTTQECARCGTLVPKPIS |
| | LRVHRCPACGYTAPRTVNSARNVLQRPLEEPGRAGPSGANGRGVPHAVA |
| SEQ | MNCRYRYRIYPTPGQRQSLARLFGCVRVVWNDALFLCRQSEKLPKNSELQKLCITQA |
| ID | KKTEARGWLGQVSAIPLQQSVADLGVAFKNFFQSRSGKRKGKKVNPPRVKRRNNRQ |
| NO: | GARFTRGGFKVKTSKVYLARIGDIKIKWSRPLPSEPSSVTVIKDCAGQYFLSFVVEVKP |
| 92 | EIKPPKNPSIGIDLGLKTFASCSNGEKIDSPDYSRLYRKLKRCQRRLAKRQRGSKRRER |
| | MRVKVAKLNAQIRDKRKDFLHKLSTKVVNENQVIALEDLNVGGMLKNRKLSRAISQ |
| | AGWYEFRSLCEGKAEKHNRDFRVISRWEPTSQVCSECGYRWGKIDLSVRSIVCINCGV |
| | EHDRDDNASVNIEQAGLKVGVGHTHDSKRTGSACKTSNGAVCVEPSTHREYVQLTLF |
| | DW |
| SEQ | MKSRWTFRCYPTPEQEQHLARTFGCVRFVWNWALRARTDAFRAGERIGYPATDKAL |
| ID | TLLKQQPETVWLNEVSSVCLQQALRDLQVAFSNFFDKRAAHPSFKRKEARQSANYTE |
| NO: | RGFSFDHERRILKLAKIGAIKVKWSRKAIPHPSSIRLIRTASGKYFVSLVVETQPAPMPE |
| 93 | TGESVGVDFGVARLATLSNGERISNPKHGAKWQRRLAFYQKRLARATKGSKRRMRIK |
| | RHVARIHEKIGNSRSDTLHKLSTDLVTRFDLICVEDLNLRGMVKNHSLARSLHDASIGS |
| | AIRMIEEKAERYGKNVVKIDRWFPSSKTCSDCGHIVEQLPLNVREWTCPECGTTHDRD |
| | ANAAANILAVGQTVSAHGGTVRRSRAKASERKSQRSANRQGVNRA |
| SEQ | KEPLNIGKTAKAVFKEIDPTSLNRAANYDASIELNCKECKFKPFKNVKRYEFNFYNNW |
| ID | YRCNPNSCLQSTYKAQVRKVEIGYEKLKNEILTQMQYYPWFGRLYQNFFHDERDKM |
| NO: | TSLDEIQVIGVQNKVFFNTVEKAWREIIKKRFKDNKETMETIPELKHAAGHGKRKLSN |
| 94 | KSLLRRRFAFVQKSFKFVDNSDVSYRSFSNNIACVLPSRIGVDLGGVISRNPKREYIPQE |
| | ISFNAFWKQHEGLKKGRNIEIQSVQYKGETVKRIEADTGEDKAWGKNRQRRFTSLILK |
| | LVPKQGGKKVWKYPEKRNEGNYEYFPIPIEFILDSGETSIRFGGDEGEAGKQKHLVIPF |
| | NDSKATPLASQQTLLENSRFNAEVKSCIGLAIYANYFYGYARNYVISSIYHKNSKNGQ |
| | AITAIYLESIAHNYVKAIERQLQNLLLNLRDFSFMESHKKELKKYFGGDLEGTGGAQK |
| | RREKEEKIEKEIEQSYLPRLIRLSLTKMVTKQVEM |
| SEQ | ELIVNENKDPLNIGKTAKAVFKEIDPTSINRAANYDASIELACKECKFKPFNNTKRHDF |
| ID | SFYSNWHRCSPNSCLQSTYRAKIRKTEIGYEKLKNEILNQMQYYPWFGRLYQNFFNDQ |
| NO: | RDKMTSLDEIQVTGVQNKIFFNTVEKAWREIIKKRFRDNKETMRTIPDLKNKSGHGSR |
| 95 | KLSNKSLLRRRFAFAQKSFKLVDNSDVSYRAFSNNVACVLPSKIGVDIGGIINKDLKRE |
| | YIPQEITFNVFWKQHDGLKKGRNIEIHSVQYKGEIVKRIEADTGEDKAWGKNRQRRFT |
| | SLILKITPKQGGKKIWKFPEKKNASDYEYFPIPIEFILDNGDASIKFGGEEGEVGKQKHL |
| | LIPFNDSKATPLSSKQMLLETSRFNAEVKSTIGLALYANYFVSYARNYVIKSTYHKNSK |
| | KGQIVTEIYLESISQNFVRAIQRQLQSLMLNLKDWGFMQTHKKELKKYFGSDLEGSKG |
| | GQKRREKEEKIEKEIEASYLPRLIRLSLTKSVTKAEEM |
| SEQ | PEEKTSKLKPNSINLAANYDANEKFNCKECKFHPFKNKKRYEFNFYNNLHGCKSCTKS |
| ID | TNNPAVKRIEIGYQKLKFEIKNQMEAYPWFGRLRINFYSDEKRKMSELNEMQVTGVK |
| NO: | NKIFFDAIECAWREILKKRFRESKETLITIPKLKNKAGHGARKHRNKKLLIRRRAFMKK |
| 96 | NFHFLDNDSISYRSFANNIACVLPSKVGVDIGGIISPDVGKDIKPVDISLNLMWASKEGI |
| | KSGRKVEIYSTQYDGNMVKKIEAETGEDKSWGKNRKRRQTSLLLSIPKPSKQVQEFDF |
| | KEWPRYKDIEKKVQWRGFPIKIIFDSNHNSIEFGTYQGGKQKVLPIPFNDSKTTPLGSK |
| | MNKLEKLRFNSKIKSRLGSAIAANKFLEAARTYCVDSLYHEVSSANAIGKGKIFIEYYL |
| | EILSQNYIEAAQKQLQRFIESIEQWFVADPFQGRLKQYFKDDLKRAKCFLCANREVQT |
| | TCYAAVKLHKSCAEKVKDKNKELAIKERNNKEDAVIKEVEASNYPRVIRLKLTKTITN |
| | KAM |
| SEQ | SESENKIIEQYYAFLYSFRDKYEKPEFKNRGDIKRKLQNKWEDFLKEQNLKNDKKLSN |
| ID | YIFSNRNFRRSYDREEENEEGIDEKKSKPKRINCFEKEKNLKDQYDKDAINASANKDG |
| NO: | AQKWGCFECIFFPMYKIESGDPNKRIIINKTRFKLFDFYLNLKGCKSCLRSTYHPYRSN |
| 97 | VYIESNYDKLKREIGNFLQQKNIFQRMRKAKVSEGKYLTNLDEYRLSCVAMHFKNRW |
| | LFFDSIQKVLRETIKQRLKQMRESYDEQAKTKRSKGHGRAKYEDQVRMIRRRAYSAQ |
| | AHKLLDNGYITLFDYDDKEINKVCLTAINQEGFDIGGYLNSDIDNVMPPIEISFHLKWK |
| | YNEPILNIESPFSKAKISDYLRKIREDLNLERGKEGKARSKKNVRRKVLASKGEDGYKK |
| | IFTDFFSKWKEELEGNAMERVLSQSSGDIQWSKKKRIHYTTLVLNINLLDKKGVGNLK |
| | YYEIAEKTKILSFDKNENKFWPITIQVLLDGYEIGTEYDEIKQLNEKTSKQFTIYDPNTKI |
| | IKIPFTDSKAVPLGMLGINIATLKTVKKTERDIKVSKIFKGGLNSKIVSKIGKGIYAGYFP |
| | TVDKEILEEVEEDTLDNEFSSKSQRNIFLKSIIKNYDKMLKEQLFDFYSFLVRNDLGVRF |
| | LTDRELQNIEDESFNLEKRFFETDRDRIARWFDNTNTDDGKEKFKKLANEIVDSYKPR |
| | LIRLPVVRVIKRIQPVKQREM |
| SEQ | KYSTRDFSELNEIQVTACKQDEFFKVIQNAWREIIKKRFLENRENFIEKKIFKNKKGRG |
| ID | KRQESDKTIQRNRASVMKNFQLIENEKIILRAPSGHVACVFPVKVGLDIGGFKTDDLEK |
| NO: | NIFPPRTITINVFWKNRDRQRKGRKLEVWGIKARTKLIEKVHKWDKLEEVKKKRLKSL |
| 98 | EQKQEKSLDNWSEVNNDSFYKVQIDELQEKIDKSLKGRTMNKILDNKAKESKEAEGL |
| | YIEWEKDFEGEMLRRIEASTGGEEKWGKRRQRRHTSLLLDIKNNSRGSKEIINFYSYAK |
| | QGKKEKKIEFFPFPLTITLDAEEESPLNIKSIPIEDKNATSKYFSIPFTETRATPLSILGDRV |
| | QKFKTKNISGAIKRNLGSSISSCKIVQNAETSAKSILSLPNVKEDNNMEIFINTMSKNYF |
| | RAMMKQMESFIFEMEPKTLIDPYKEKAIKWFEVAASSRAKRKLKKLSKADIKKSELLL |
| | SNTEEFEKEKQEKLEALEKEIEEFYLPRIVRLQLTKTILETPVM |
| SEQ | KKLQLLGHKILLKEYDPNAVNAAANFETSTAELCGQCKMKPFKNKRRFQYTFGKNY |
| ID | HGCLSCIQNVYYAKKRIVQIAKEELKHQLTDSIASIPYKYTSLFSNTNSIDELYILKQER |
| NO: | AAFFSNTNSIDELYITGIENNIAFKVISAIWDEIIKKRRQRYAESLTDTGTVKANRGHGG |
| 99 | TAYKSNTRQEKIRALQKQTLHMVTNPYISLARYKNNYIVATLPRTIGMHIGAIKDRDP |
| | QKKLSDYAINFNVFWSDDRQLIELSTVQYTGDMVRKIEAETGENNKWGENMKRTKTS |
| | LLLEILTKKTTDELTFKDWAFSTKKEIDSVTKKTYQGFPIGIIFEGNESSVKFGSQNYFPL |
| | PFDAKITPPTAEGFRLDWLRKGSFSSQMKTSYGLAIYSNKVTNAIPAYVIKNMFYKIAR |
| | AENGKQIKAKFLKKYLDIAGNNYVPFIIMQHYRVLDTFEEMPISQPKVIRLSLTKTQHII |
| | IKKDKTDSKM |
| SEQ | NTSNLINLGKKAINISANYDANLEVGCKNCKFLSSNGNFPRQTNVKEGCHSCEKSTYE |
| ID | PSIYLVKIGERKAKYDVLDSLKKFTFQSLKYQSKKSMKSRNKKPKELKEFVIFANKNK |
| NO: | AFDVIQKSYNHLILQIKKEINRMNSKKRKKNHKRRLFRDREKQLNKLRLIESSNLFLPR |
| 100 | ENKGNNHVFTYVAIHSVGRDIGVIGSYDEKLNFETELTYQLYFNDDKRLLYAYKPKQ |
| | NKIIKIKEKLWNLRKEKEPLDLEYEKPLNKSITFSIKNDNLFKVSKDLMLRRAKFNIQG |
| | KEKLSKEERKINRDLIKIKGLVNSMSYGRFDELKKEKNIWSPHIYREVRQKEIKPCLIKN |
| | GDRIEIFEQLKKKMERLRRFREKRQKKISKDLIFAERIAYNFHTKSIKNTSNKINIDQEA |
| | KRGKASYMRKRIGYETFKNKYCEQCLSKGNVYRNVQKGCSCFENPFDWIKKGDENL |
| | LPKKNEDLRVKGAFRDEALEKQIVKIAFNIAKGYEDFYDNLGESTEKDLKLKFKVGTT |
| | INEQESLKL |
| SEQ | TSNPIKLGKKAINISANYDSNLQIGCKNCKFLSYNGNFPRQTNVKEGCHSCEKSTYEPP |
| ID | VYTVRIGERRSKYDVLDSLKKFIFLSLKYRQSKKMKTRSKGIRGLEEFVISANLKKAM |
| NO: | DVIQKSYRHLILNIKNEIVRMNGKKRNKNHKRLLFRDREKQLNKLRLIEGSSFFKPPTV |
| 101 | KGDNSIFTCVAIHNIGRDIGIAGDYFDKLEPKIELTYQLYYEYNPKKESEINKRLLYAYK |
| | PKQNKIIEIKEKLWNLRKEKSPLDLEYEKPLTKSITFLVKRDGVFRISKDLMLRKAKFII |
| | QGKEKLSKEERKINRDLIKIKSNIISLTYGRFDELKKDKTIWSPHIFRDVKQGKITPCIER |
| | KGDRMDIFQQLRKKSERLRENRKKRQKKISKDLIFAERIAYNFHTKSIKNTSNLINIKHE |
| | AKRGKASYMRKRIGNETFRIKYCEQCFPKNNVYKNVQKGCSCFEDPFEYIKKGNEDLI |
| | PNKNQDLKAKGAFRDDALEKQIIKVAFNIAKGYEDFYENLKKTTEKDIRLKFKVGTIIS |
| | EEM |
| SEQ | NNSINLSKKAINISANYDANLQVRCKNCKFLSSNGNFPRQTDVKEGCHSCEKSTYEPP |
| ID | VYDVKIGEIKAKYEVLDSLKKFTFQSLKYQLSKSMKFRSKKIKELKEFVIFAKESKALN |
| NO: | VINRSYKHLILNIKNDINRMNSKKRIKNHKGRLFLDRQKQLSKLKLIEGSSFFVPAKNV |
| 102 | GNKSVFTCVAIHSIGRDIGIAGLYDSFTKPVNEITYQIFFSGERRLLYAYKPKQLKILSIK |
| | ENLWSLKNEKKPLDLLYEKPLGKNLNFNVKGGDLFRVSKDLMIRNAKFNVHGRQRLS |
| | DEERLINRNFIKIKGEVVSLSYGRFEELKKDRKLWSPHIFKDVRQNKIKPCLVMQGQRI |
| | DIFEQLKRKLELLKKIRKSRQKKLSKDLIFGERIAYNFHTKSIKNTSNKINIDSDAKRGR |
| | ASYMRKRIGNETFKLKYCDVCFPKANVYRRVQNGCSCSENPYNYIKKGDKDLLPKKD |
| | EGLAIKGAFRDEKLNKQIIKVAFNIAKGYEDFYDDLKKRTEKDVDLKFKIGTTVLDQK |
| | PMEIFDGIVITWL |
| SEQ | LLTTVVETNNLAKKAINVAANFDANIDRQYYRCTPNLCRFIAQSPRETKEKDAGCSSC |
| ID | TQSTYDPKVYVIKIGKLLAKYEILKSLKRFLFMNRYFKQKKTERAQQKQKIGTELNEM |
| NO: | SIFAKATNAMEVIKRATKHCTYDIIPETKSLQMLKRRRHRVKVRSLLKILKERRMKIKK |
| 103 | IPNTFIEIPKQAKKNKSDYYVAAALKSCGIDVGLCGAYEKNAEVEAEYTYQLYYEYKG |
| | NSSTKRILYCYNNPQKNIREFWEAFYIQGSKSHVNTPGTIRLKMEKFLSPITIESEALDF |
| | RVWNSDLKIRNGQYGFIKKRSLGKEAREIKKGMGDIKRKIGNLTYGKSPSELKSIHVY |
| | RTERENPKKPRAARKKEDNFMEIFEMQRKKDYEVNKKRRKEATDAAKIMDFAEEPIR |
| | HYHTNNLKAVRRIDMNEQVERKKTSVFLKRIMQNGYRGNYCRKCIKAPEGSNRDEN |
| | VLEKNEGCLDCIGSEFIWKKSSKEKKGLWHTNRLLRRIRLQCFTTAKAYENFYNDLFE |
| | KKESSLDIIKLKVSITTKSM |
| SEQ | ASTMNLAKQAINFAANYDSNLEIGCKGCKFMSTWSKKSNPKFYPRQNNQANKCHSCT |
| ID | YSTGEPEVPIIEIGERAAKYKIFTALKKFVFMSVAYKERRRQRFKSKKPKELKELAICSN |
| NO: | REKAMEVIQKSVVHCYGDVKQEIPRIRKIKVLKNHKGRLFYKQKRSKIKIAKLEKGSFF |
| 104 | KTFIPKVHNNGCHSCHEASLNKPILVTTALNTIGADIGLINDYSTIAPTETDISWQVYYE |
| | FIPNGDSEAVKKRLLYFYKPKGALIKSIRDKYFKKGHENAVNTGFFKYQGKIVKGPIKF |
| | VNNELDFARKPDLKSMKIKRAGFAIPSAKRLSKEDREINRESIKIKNKIYSLSYGRKKTL |
| | SDKDIIKHLYRPVRQKGVKPLEYRKAPDGFLEFFYSLKRKERRLRKQKEKRQKDMSEII |
| | DAADEFAWHRHTGSIKKTTNHINFKSEVKRGKVPIMKKRIANDSFNTRHCGKCVKQG |
| | NAINKYYIEKQKNCFDCNSIEFKWEKAALEKKGAFKLNKRLQYIVKACFNVAKAYES |
| | FYEDFRKGEEESLDLKFKIGTTTTLKQYPQNKARAM |
| SEQ | HSHNLMLTKLGKQAINFAANYDANLEIGCKNCKFLSYSPKQANPKKYPRQTDVHEDG |
| ID | NIACHSCMQSTKEPPVYIVPIGERKSKYEILTSLNKFTFLALKYKEKKRQAFRAKKPKE |
| NO: | LQELAIAFNKEKAIKVIDKSIQHLILNIKPEIARIQRQKRLKNRKGKLLYLHKRYAIKMG |
| 105 | LIKNGKYFKVGSPKKDGKKLLVLCALNTIGRDIGIIGNIEENNRSETEITYQLYFDCLDA |
| | NPNELRIKEIEYNRLKSYERKIKRLVYAYKPKQTKILEIRSKFFSKGHENKVNTGSFNFE |
| | NPLNKSISIKVKNSAFDFKIGAPFIMLRNGKFHIPTKKRLSKEEREINRTLSKIKGRVFRL |
| | TYGRNISEQGSKSLHIYRKERQHPKLSLEIRKQPDSFIDEFEKLRLKQNFISKLKKQRQK |
| | KLADLLQFADRIAYNYHTSSLEKTSNFINYKPEVKRGRTSYIKKRIGNEGFEKLYCETCI |
| | KSNDKENAYAVEKEELCFVCKAKPFTWKKTNKDKLGIFKYPSRIKDFIRAAFTVAKSY |
| | NDFYENLKKKDLKNEIFLKFKIGLILSHEKKNHISIAKSVAEDERISGKSIKNILNKSIKL |
| | EKNCYSCFFHKEDM |
| SEQ | SLERVIDKRNLAKKAINIAANFDANINKGFYRCETNQCMFIAQKPRKTNNTGCSSCLQS |
| ID | TYDPVIYVVKVGEMLAKYEILKSLKRFVFMNRSFKQKKTEKAKQKERIGGELNEMSIF |
| NO: | ANAALAMGVIKRAIRHCHVDIRPEINRLSELKKTKHRVAAKSLVKIVKQRKTKWKGIP |
| 106 | NSFIQIPQKARNKDADFYVASALKSGGIDIGLCGTYDKKPHADPRWTYQLYFDTEDES |
| | EKRLLYCYNDPQAKIRDFWKTFYERGNPSMVNSPGTIEFRMEGFFEKMTPISIESKDFD |
| | FRVWNKDLLIRRGLYEIKKRKNLNRKAREIKKAMGSVKRVLANMTYGKSPTDKKSIP |
| | VYRVEREKPKKPRAVRKEENELADKLENYRREDFLIRNRRKREATEIAKIIDAAEPPIR |
| | HYHTNHLRAVKRIDLSKPVARKNTSVFLKRIMQNGYRGNYCKKCIKGNIDPNKDECR |
| | LEDIKKCICCEGTQNIWAKKEKLYTGRINVLNKRIKQMKLECFNVAKAYENFYDNLA |
| | ALKEGDLKVLKLKVSIPALNPEASDPEEDM |
| SEQ | NASINLGKRAINLSANYDSNLVIGCKNCKFLSFNGNFPRQTNVREGCHSCDKSTYAPE |
| ID | VYIVKIGERKAKYDVLDSLKKFTFQSLKYQIKKSMRERSKKPKELLEFVIFANKDKAF |
| NO: | NVIQKSYEHLILNIKQEINRMNGKKRIKNHKKRLFKDREKQLNKLRLIGSSSLFFPREN |
| 107 | KGDKDLFTYVAIHSVGRDIGVAGSYESHIEPISDLTYQLFINNEKRLLYAYKPKQNKIIE |
| | LKENLWNLKKEKKPLDLEFTKPLEKSITFSVKNDKLFKVSKDLMLRQAKFNIQGKEKL |
| | SKEERQINRDFSKIKSNVISLSYGRFEELKKEKNIWSPHIYREVKQKEIKPCIVRKGDRIE |
| | LFEQLKRKMDKLKKFRKERQKKISKDLNFAERIAYNFHTKSIKNTSNKINIDQEAKRG |
| | KASYMRKRIGNESFRKKYCEQCFSVGNVYHNVQNGCSCFDNPIELIKKGDEGLIPKGK |
| | EDRKYKGALRDDNLQMQIIRVAFNIAKGYEDFYNNLKEKTEKDLKLKFKIGTTISTQE |
| | SNNKEM |
| SEQ | SNLIKLGKQAINFAANYDANLEVGCKNCKFLSSTNKYPRQTNVHLDNKMACRSCNQS |
| ID | TMEPAIYIVRIGEKKAKYDIYNSLTKFNFQSLKYKAKRSQRFKPKQPKELQELSIAVRK |
| NO: | EKALDIIQKSIDHLIQDIRPEIPRIKQQKRYKNHVGKLFYLQKRRKNKLNLIGKGSFFKV |
| 108 | FSPKEKKNELLVICALTNIGRDIGLIGNYNTIINPLFEVTYQLYYDYIPKKNNKNVQRRL |
| | LYAYKSKNEKILKLKEAFFKRGHENAVNLGSFSYEKPLEKSLTLKIKNDKDDFQVSPS |
| | LRIRTGRFFVPSKRNLSRQEREINRRLVKIKSKIKNMTYGKFETARDKQSVHIFRLERQ |
| | KEKLPLQFRKDEKEFMEEFQKLKRRTNSLKKLRKSRQKKLADLLQLSEKVVYNNHTG |
| | TLKKTSNFLNFSSSVKRGKTAYIKELLGQEGFETLYCSNCINKGQKTRYNIETKEKCFS |
| | CKDVPFVWKKKSTDKDRKGAFLFPAKLKDVIKATFTVAKAYEDFYDNLKSIDEKKPY |
| | IKFKIGLILAHVRHEHKARAKEEAGQKNIYNKPIKIDKNCKECFFFKEEAM |
| SEQ | NTTRKKFRKRTGFPQSDNIKLAYCSAIVRAANLDADIQKKHNQCNPNLCVGIKSNEQS |
| ID | RKYEHSDRQALLCYACNQSTGAPKVDYIQIGEIGAKYKILQMVNAYDFLSLAYNLTK |
| NO: | LRNGKSRGHQRMSQLDEVVIVADYEKATEVIKRSINHLLDDIRGQLSKLKKRTQNEHI |
| 109 | TEHKQSKIRRKLRKLSRLLKRRRWKWGTIPNPYLKNWVFTKKDPELVTVALLHKLGR |
| | DIGLVNRSKRRSKQKLLPKVGFQLYYKWESPSLNNIKKSKAKKLPKRLLIPYKNVKLF |
| | DNKQKLENAIKSLLESYQKTIKVEFDQFFQNRTEEIIAEEQQTLERGLLKQLEKKKNEF |
| | ASQKKALKEEKKKIKEPRKAKLLMEESRSLGFLMANVSYALFNTTIEDLYKKSNVVSG |
| | CIPQEPVVVFPADIQNKGSLAKILFAPKDGFRIKFSGQHLTIRTAKFKIRGKEIKILTKTK |
| | REILKNIEKLRRVWYREQHYKLKLFGKEVSAKPRFLDKRKTSIERRDPNKLADQTDDR |
| | QAELRNKEYELRHKQHKMAERLDNIDTNAQNLQTLSFWVGEADKPPKLDEKDARGF |
| | GVRTCISAWKWFMEDLLKKQEEDPLLKLKLSIM |
| SEQ | PKKPKFQKRTGFPQPDNLRKEYCLAIVRAANLDADFEKKCTKCEGIKTNKKGNIVKGR |
| ID | TYNSADKDNLLCYACNISTGAPAVDYVFVGALEAKYKILQMVKAYDFHSLAYNLAK |
| NO: | LWKGRGRGHQRMGGLNEVVIVSNNEKALDVIEKSLNHFHDEIRGELSRLKAKFQNEH |
| 110 | LHVHKESKLRRKLRKISRLLKRRRWKWDVIPNSYLRNFTFTKTRPDFISVALLHRVGR |
| | DIGLVTKTKIPKPTDLLPQFGFQIYYTWDEPKLNKLKKSRLRSEPKRLLVPYKKIELYK |
| | NKSVLEEAIRHLAEVYTEDLTICFKDFFETQKRKFVSKEKESLKRELLKELTKLKKDFS |
| | ERKTALKRDRKEIKEPKKAKLLMEESRSLGFLAANTSYALFNLIAADLYTKSKKACST |
| | KLPRQLSTILPLEIKEHKSTTSLAIKPEEGFKIRFSNTHLSIRTPKFKMKGADIKALTKRK |
| | REILKNATKLEKSWYGLKHYKLKLYGKEVAAKPRFLDKRNPSIDRRDPKELMEQIEN |
| | RRNEVKDLEYEIRKGQHQMAKRLDNVDTNAQNLQTKSFWVGEADKPPELDSMEAK |
| | KLGLRTCISAWKWFMKDLVLLQEKSPNLKLKLSLTEM |
| SEQ | KFSKRQEGFLIPDNIDLYKCLAIVRSANLDADVQGHKSCYGVKKNGTYRVKQNGKKG |
| ID | VKEKGRKYVFDLIAFKGNIEKIPHEAIEEKDQGRVIVLGKFNYKLILNIEKNHNDRASL |
| NO: | EIKNKIKKLVQISSLETGEFLSDLLSGKIGIDEVYGIIEPDVFSGKELVCKACQQSTYAPL |
| 111 | VEYMPVGELDAKYKILSAIKGYDFLSLAYNLSRNRANKKRGHQKLGGGELSEVVISA |
| | NYDKALNVIKRSINHYHVEIKPEISKLKKKMQNEPLKVMKQARIRRELHQLSRKVKRL |
| | KWKWGMIPNPELQNIIFEKKEKDFVSYALLHTLGRDIGLFKDTSMLQVPNISDYGFQIY |
| | YSWEDPKLNSIKKIKDLPKRLLIPYKRLDFYIDTILVAKVIKNLIELYRKSYVYETFGEE |
| | YGYAKKAEDILFDWDSINLSEGIEQKIQKIKDEFSDLLYEARESKRQNFVESFENILGLY |
| | DKNFASDRNSYQEKIQSMIIKKQQENIEQKLKREFKEVIERGFEGMDQNKKYYKVLSP |
| | NIKGGLLYTDTNNLGFFRSHLAFMLLSKISDDLYRKNNLVSKGGNKGILDQTPETMLT |
| | LEFGKSNLPNISIKRKFFNIKYNSSWIGIRKPKFSIKGAVIREITKKVRDEQRLIKSLEGV |
| | WHKSTHFKRWGKPRFNLPRHPDREKNNDDNLMESITSRREQIQLLLREKQKQQEKMA |
| | GRLDKIDKEIQNLQTANFQIKQIDKKPALTEKSEGKQSVRNALSAWKWFMEDLIKYQ |
| | KRTPILQLKLAKM |
| SEQ | KFSKRQEGFVIPENIGLYKCLAIVRSANLDADVQGHVSCYGVKKNGTYVLKQNGKKSI |
| ID | REKGRKYASDLVAFKGDIEKIPFEVIEEKKKEQSIVLGKFNYKLVLDVMKGEKDRASL |
| NO: | TMKNKSKKLVQVSSLGTDEFLLTLLNEKFGIEEIYGIIEPEVFSGKKLVCKACQQSTYA |
| 112 | PLVEYMPVGELDSKYKILSAIKGYDFLSLAYNLARHRSNKKRGHQKLGGGELSEVVIS |
| | ANNAKALNVIKRSLNHYYSEIKPEISKLRKKMQNEPLKVGKQARMRRELHQLSRKVK |
| | RLKWKWGKIPNLELQNITFKESDRDFISYALLHTLGRDIGMFNKTEIKMPSNILGYGFQ |
| | IYYDWEEPKLNTIKKSKNTPKRILIPYKKLDFYNDSILVARAIKELVGLFQESYEWEIFG |
| | NEYNYAKEAEVELIKLDEESINGNVEKKLQRIKENFSNLLEKAREKKRQNFIESFESIAR |
| | LYDESFTADRNEYQREIQSFIIEKQKQSIEKKLKNEFKKIVEKKFNEQEQGKKHYRVLN |
| | PTIINEFLPKDKNNLGFLRSKIAFILLSKISDDLYKKSNAVSKGGEKGIIKQQPETILDLEF |
| | SKSKLPSINIKKKLFNIKYTSSWLGIRKPKFNIKGAKIREITRRVRDVQRTLKSAESSWY |
| | ASTHFRRWGFPRFNQPRHPDKEKKSDDRLIESITLLREQIQILLREKQKGQKEMAGRLD |
| | DVDKKIQNLQTANFQIKQTGDKPALTEKSAGKQSFRNALSAWKWFMENLLKYQNKT |
| | PDLKLKIARTVM |
| SEQ | KWIEPNNIDFNKCLAITRSANLDADVQGHKMCYGIKTNGTYKAIGKINKKHNTGIIEK |
| ID | RRTYVYDLIVTKEKNEKIVKKTDFMAIDEEIEFDEKKEKLLKKYIKAEVLGTGELIRKD |
| NO: | LNDGEKFDDLCSIEEPQAFRRSELVCKACNQSTYASDIRYIPIGEIEAKYKILKAIKGYD |
| 113 | FLSLKYNLGRLRDSKKRGHQKMGQGELKEFVICANKEKALDVIKRSLNHYLNEVKDE |
| | ISRLNKKMQNEPLKVNDQARWRRELNQISRRLKRLKWKWGEIPNPELKNLIFKSSRPE |
| | FVSYALIHTLGRDIGLINETELKPNNIQEYGFQIYYKWEDPELNHIKKVKNIPKRFIIPYK |
| | NLDLFGKYTILSRAIEGILKLYSSSFQYKSFKDPNLFAKEGEKKITNEDFELGYDEKIKKI |
| | KDDFKSYKKALLEKKKNTLEDSLNSILSVYEQSLLTEQINNVKKWKEGLLKSKESIHK |
| | QKKIENIEDIISRIEELKNVEGWIRTKERDIVNKEETNLKREIKKELKDSYYEEVRKDFS |
| | DLKKGEESEKKPFREEPKPIVIKDYIKFDVLPGENSALGFFLSHLSFNLFDSIQYELFEKS |
| | RLSSSKHPQIPETILDL |
| SEQ | FRKFVKRSGAPQPDNLNKYKCIAIVRAANLDADIMSNESSNCVMCKGIKMNKRKTAK |
| ID | GAAKTTELGRVYAGQSGNLLCTACTKSTMGPLVDYVPIGRIRAKYTILRAVKEYDFLS |
| NO: | LAYNLARTRVSKKGGRQKMHSLSELVIAAEYEIAWNIIKSSVIHYHQETKEEISGLRKK |
| 114 | LQAEHIHKNKEARIRREMHQISRRIKRLKWKWHMIPNSELHNFLFKQQDPSFVAVALL |
| | HTLGRDIGMINKPKGSAKREFIPEYGFQIYYKWMNPKLNDINKQKYRKMPKRSLIPYK |
| | NLNVFGDRELIENAMHKLLKLYDENLEVKGSKFFKTRVVAISSKESEKLKRDLLWKG |
| | ELAKIKKDFNADKNKMQELFKEVKEPKKANALMKQSRNMGFLLQNISYGALGLLAN |
| | RMYEASAKQSKGDATKQPSIVIPLEMEFGNAFPKLLLRSGKFAMNVSSPWLTIRKPKF |
| | VIKGNKIKNITKLMKDEKAKLKRLETSYHRATHFRPTLRGSIDWDSPYFSSPKQPNTHR |
| | RSPDRLSADITEYRGRLKSVEAELREGQRAMAKKLDSVDMTASNLQTSNFQLEKGED |
| | PRLTEIDEKGRSIRNCISSWKKFMEDLMKAQEANPVIKIKIALKDESSVLSEDSM |
| SEQ | KFHPENLNKSYCLAIVRAANLDADIQGHINCIGIKSNKSDRNYENKLESLQNVELLCKA |
| ID | CTKSTYKPNINSVPVGEKKAKYSILSEIKKYDFNSLVYNLKKYRKGKSRGHQKLNELR |
| NO: | ELVITSEYKKALDVINKSVNHYLVNIKNKMSKLKKILQNEHIHVGTLARIRRERNRISR |
| 115 | KLDHYRKKWKFVPNKILKNYVFKNQSPDFVSVALLHKLGRDIGLITKTAILQKSFPEY |
| | SLQLYYKYDTPKLNYLKKSKFKSLPKRILISYKYPKFDINSNYIEESIDKLLKLYEESPIY |
| | KNNSKIIEFFKKSEDNLIKSENDSLKRGIMKEFEKVTKNFSSKKKKLKEELKLKNEDKN |
| | SKMLAKVSRPIGFLKAYLSYMLFNIISNRIFEFSRKSSGRIPQLPSCIINLGNQFENFKNEL |
| | QDSNIGSKKNYKYFCNLLLKSSGFNISYEEEHLSIKTPNFFINGRKLKEITSEKKKIRKEN |
| | EQLIKQWKKLTFFKPSNLNGKKTSDKIRFKSPNNPDIERKSEDNIVENIAKVKYKLEDL |
| | LSEQRKEFNKLAKKHDGVDVEAQCLQTKSFWIDSNSPIKKSLEKKNEKVSVKKKMKA |
| | IRSCISAWKWFMADLIEAQKETPMIKLKLALM |
| SEQ | TTLVPSHLAGIEVMDETTSRNEDMIQKETSRSNEDENYLGVKNKCGINVHKSGRGSSK |
| ID | HEPNMPPEKSGEGQMPKQDSTEMQQRFDESVTGETQVSAGATASIKTDARANSGPRV |
| NO: | GTARALIVKASNLDRDIKLGCKPCEYIRSELPMGKKNGCNHCEKSSDIASVPKVESGFR |
| 116 | KAKYELVRRFESFAADSISRHLGKEQARTRGKRGKKDKKEQMGKVNLDEIAILKNES |
| | LIEYTENQILDARSNRIKEWLRSLRLRLRTRNKGLKKSKSIRRQLITLRRDYRKWIKPNP |
| | YRPDEDPNENSLRLHTKLGVDIGVQGGDNKRMNSDDYETSFSITWRDTATRKICFTKP |
| | KGLLPRHMKFKLRGYPELILYNEELRIQDSQKFPLVDWERIPIFKLRGVSLGKKKVKAL |
| | NRITEAPRLVVAKRIQVNIESKKKKVLTRYVYNDKSINGRLVKAEDSNKDPLLEFKKQ |
| | AEEINSDAKYYENQEIAKNYLWGCEGLHKNLLEEQTKNPYLAFKYGFLNIV |
| SEQ | LDFKRTCSQELVLLPEIEGLKLSGTQGVTSLAKKLINKAANVDRDESYGCHHCIHTRTS |
| ID | LSKPVKKDCNSCNQSTNHPAVPITLKGYKIAFYELWHRFTSWAVDSISKALHRNKVM |
| NO: | GKVNLDEYAVVDNSHIVCYAVRKCYEKRQRSVRLHKRAYRCRAKHYNKSQPKVGRI |
| 117 | YKKSKRRNARNLKKEAKRYFQPNEITNGSSDALFYKIGVDLGIAKGTPETEVKVDVSI |
| | CFQVYYGDARRVLRVRKMDELQSFHLDYTGKLKLKGIGNKDTFTIAKRNESLKWGST |
| | KYEVSRAHKKFKPFGKKGSVKRKCNDYFRSIASWSCEAASQRAQSNLKNAFPYQKAL |
| | VKCYKNLDYKGVKKNDMWYRLCSNRIFRYSRIAEDIAQYQSDKGKAKFEFVILAQSV |
| | AEYDISAIM |
| SEQ | VFLTDDKRKTALRKIRSAFRKTAEIALVRAQEADSLDRQAKKLTIETVSFGAPGAKNA |
| ID | FIGSLQGYNWNSHRANVPSSGSAKDVFRITELGLGIPQSAHEASIGKSFELVGNVVRYT |
| NO: | ANLLSKGYKKGAVNKGAKQQREIKGKEQLSFDLISNGPISGDKLINGQKDALAWWLI |
| 118 | DKMGFHIGLAMEPLSSPNTYGITLQAFWKRHTAPRRYSRGVIRQWQLPFGRQLAPLIH |
| | NFFRKKGASIPIVLTNASKKLAGKGVLLEQTALVDPKKWWQVKEQVTGPLSNIWERS |
| | VPLVLYTATFTHKHGAAHKRPLTLKVIRISSGSVFLLPLSKVTPGKLVRAWMPDINILR |
| | DGRPDEAAYKGPDLIRARERSFPLAYTCVTQIADEWQKRALESNRDSITPLEAKLVTG |
| | SDLLQIHSTVQQAVEQGIGGRISSPIQELLAKDALQLVLQQLFMTVDLLRIQWQLKQEV |
| | ADGNTSEKAVGWAIRISNIHKDAYKTAIEPCTSALKQAWNPLSGFEERTFQLDASIVRK |
| | RSTAKTPDDELVIVLRQQAAEMTVAVTQSVSKELMELAVRHSATLHLLVGEVASKQL |
| | SRSADKDRGAMDHWKLLSQSM |
| SEQ | EDLLQKALNTATNVAAIERHSCISCLFTESEIDVKYKTPDKIGQNTAGCQSCTFRVGYS |
| ID | GNSHTLPMGNRIALDKLRETIQRYAWHSLLFNVPPAPTSKRVRAISELRVAAGRERLFT |
| NO: | VITFVQTNILSKLQKRYAANWTPKSQERLSRLREEGQHILSLLESGSWQQKEVVREDQ |
| 119 | DLIVCSALTKPGLSIGAFCRPKYLKPAKHALVLRLIFVEQWPGQIWGQSKRTRRMRRR |
| | KDVERVYDISVQAWALKGKETRISECIDTMRRHQQAYIGVLPFLILSGSTVRGKGDCPI |
| | LKEITRMRYCPNNEGLIPLGIFYRGSANKLLRVVKGSSFTLPMWQNIETLPHPEPFSPEG |
| | WTATGALYEKNLAYWSALNEAVDWYTGQILSSGLQYPNQNEFLARLQNVIDSIPRKW |
| | FRPQGLKNLKPNGQEDIVPNEFVIPQNAIRAHHVIEWYHKTNDLVAKTLLGWGSQTTL |
| | NQTRPQGDLRFTYTRYYFREKEVPEV |
| SEQ | VPKKKLMRELAKKAVFEAIFNDPIPGSFGCKRCTLIDGARVTDAIEKKQGAKRCAGCE |
| ID | PCTFHTLYDSVKHALPAATGCDRTAIDTGLWEILTALRSYNWMSFRRNAVSDASQKQ |
| NO: | VWSIEELAIWADKERALRVILSALTHTIGKLKNGFSRDGVWKGGKQLYENLAQKDLA |
| 120 | KGLFANGEIFGKELVEADHDMLAWTIVPNHQFHIGLIRGNWKPAAVEASTAFDARWL |
| | TNGAPLRDTRTHGHRGRRFNRTEKLTVLCIKRDGGVSEEFRQERDYELSVMLLQPKN |
| | KLKPEPKGELNSFEDLHDHWWFLKGDEATALVGLTSDPTVGDFIQLGLYIRNPIKAHG |
| | ETKRRLLICFEPPIKLPLRRAFPSEAFKTWEPTINVFRNGRRDTEAYYDIDRARVFEFPE |
| | TRVSLEHLSKQWEVLRLEPDRENTDPYEAQQNEGAELQVYSLLQEAAQKMAPKVVID |
| | PFGQFPLELFSTFVAQLFNAPLSDTKAKIGKPLDSGFVVESHLHLLEEDFAYRDFVRVT |
| | FMGTEPTFRVIHYSNGEGYWKKTVLKGKNNIRTALIPEGAKAAVDAYKNKRCPLTLE |
| | AAILNEEKDRRLVLGNKALSLLAQTARGNLTILEALAAEVLRPLSGTEGVVHLHACVT |
| | RHSTLTESTETDNM |
| SEQ | VEKLFSERLKRAMWLKNEAGRAPPAETLTLKHKRVSGGHEKVKEELQRVLRSLSGTN |
| ID | QAAWNLGLSGGREPKSSDALKGEKSRVVLETVVFHSGHNRVLYDVIEREDQVHQRSS |
| NO: | IMHMRRKGSNLLRLWGRSGKVRRKMREEVAEIKPVWHKDSRWLAIVEEGRQSVVGI |
| 121 | SSAGLAVFAVQESQCTTAEPKPLEYVVSIWFRGSKALNPQDRYLEFKKLKTTEALRGQ |
| | QYDPIPFSLKRGAGCSLAIRGEGIKFGSRGPIKQFFGSDRSRPSHADYDGKRRLSLFSKY |
| | AGDLADLTEEQWNRTVSAFAEDEVRRATLANIQDFLSISHEKYAERLKKRIESIEEPVS |
| | ASKLEAYLSAIFETFVQQREALASNFLMRLVESVALLISLEEKSPRVEFRVARYLAESK |
| | EGFNRKAM |
| SEQ | VVITQSELYKERLLRVMEIKNDRGRKEPRESQGLVLRFTQVTGGQEKVKQKLWLIFEG |
| ID | FSGTNQASWNFGQPAGGRKPNSGDALKGPKSRVTYETVVFHFGLRLLSAVIERHNLK |
| NO: | QQRQTMAYMKRRAAARKKWARSGKKCSRMRNEVEKIKPKWHKDPRWFDIVKEGEP |
| 122 | SIVGISSAGFAIYIVEEPNFPRQDPLEIEYAISIWFRRDRSQYLTFKKIQKAEKLKELQYN |
| | PIPFRLKQEKTSLVFESGDIKFGSRGSIEHFRDEARGKPPKADMDNNRRLTMFSVFSGN |
| | LTNLTEEQYARPVSGLLAPDEKRMPTLLKKLQDFFTPIHEKYGERIKQRLANSEASKRP |
| | FKKLEEYLPAIYLEFRARREGLASNWVLVLINSVRTLVRIKSEDPYIEFKVSQYLLEKE |
| | DNKAL |
| SEQ | KQDALFEERLKKAIFIKRQADPLQREELSLLPPNRKIVTGGHESAKDTLKQILRAINGTN |
| ID | QASWNPGTPSGKRDSKSADALAGPKSRVKLETVVFHVGHRLLKKVVEYQGHQKQQH |
| NO: | GLKAFMRTCAAMRKKWKRSGKVVGELREQLANIQPKWHYDSRPLNLCFEGKPSVVG |
| 123 | LRSAGIALYTIQKSVVPVKEPKPIEYAVSIWFRGPKAMDREDRCLEFKKLKIATELRKL |
| | QFEPIVSTLTQGIKGFSLYIQGNSVKFGSRGPIKYFSNESVRQRPPKADPDGNKRLALFS |
| | KFSGDLSDLTEEQWNRPILAFEGIIRRATLGNIQDYLTVGHEQFAISLEQLLSEKESVLQ |
| | MSIEQQRLKKNLGKKAENEWVESFGAEQARKKAQGIREYISGFFQEYCSQREQWAEN |
| | WVQQLNKSVRLFLTIQDSTPFIEFRVARYLPKGEKKKGKAM |
| SEQ | ANHAERHKRLRKEANRAANRNRPLVADCDTGDPLVGICRLLRRGDKMQPNKTGCRS |
| ID | CEQVEPELRDAILVSGPGRLDNYKYELFQRGRAMAVHRLLKRVPKLNRPKKAAGNDE |
| NO: | KKAENKKSEIQKEKQKQRRMMPAVSMKQVSVADFKHVIENTVRHLFGDRRDREIAE |
| 124 | CAALRAASKYFLKSRRVRPRKLPKLANPDHGKELKGLRLREKRAKLKKEKEKQAELA |
| | RSNQKGAVLHVATLKKDAPPMPYEKTQGRNDYTTFVISAAIKVGATRGTKPLLTPQP |
| | REWQCSLYWRDGQRWIRGGLLGLQAGIVLGPKLNRELLEAVLQRPIECRMSGCGNPL |
| | QVRGAAVDFFMTTNPFYVSGAAYAQKKFKPFGTKRASEDGAAAKAREKLMTQLAK |
| | VLDKVVTQAAHSPLDGIWETRPEAKLRAMIMALEHEWIFLRPGPCHNAAEEVIKCDC |
| | TGGHAILWALIDEARGALEHKEFYAVTRAHTHDCEKQKLGGRLAGFLDLLIAQDVPL |
| | DDAPAARKIKTLLEATPPAPCYKAATSIATCDCEGKFDKLWAIIDATRAGHGTEDLWA |
| | RTLAYPQNVNCKCKAGKDLTHRLADFLGLLIKRDGPFRERPPHKVTGDRKLVFSGDK |
| | KCKGHQYVILAKAHNEEVVRAWISRWGLKSRTNKAGYAATELNLLLNWLSICRRRW |
| | MDMLTVQRDTPYIRMKTGRLVVDDKKERKAM |
| SEQ | AKQREALRVALERGIVRASNRTYTLVTNCTKGGPLPEQCRMIERGKARAMKWEPKLV |
| ID | GCGSCAAATVDLPAIEEYAQPGRLDVAKYKLTTQILAMATRRMMVRAAKLSRRKGQ |
| NO: | WPAKVQEEKEEPPEPKKMLKAVEMRPVAIVDFNRVIQTTIEHLWAERANADEAELKA |
| 125 | LKAAAAYFGPSLKIRARGPPKAAIGRELKKAHRKKAYAERKKARRKRAELARSQARG |
| | AAAHAAIRERDIPPMAYERTQGRNDVTTIPIAAAIKIAATRGARPLPAPKPMKWQCSL |
| | YWNEGQRWIRGGMLTAQAYAHAANIHRPMRCEMWGVGNPLKVRAFEGRVADPDG |
| | AKGRKAEFRLQTNAFYVSGAAYRNKKFKPFGTDRGGIGSARKKRERLMAQLAKILDK |
| | VVSQAAHSPLDDIWHTRPAQKLRAMIKQLEHEWMFLRPQAPTVEGTKPDVDVAGNM |
| | QRQIKALMAPDLPPIEKGSPAKRFTGDKRKKGERAVRVAEAHSDEVVTAWISRWGIQ |
| | TRRNEGSYAAQELELLLNWLQICRRRWLDMTAAQRVSPYIRMKSGRMITDAADEGV |
| | APIPLVENM |
| SEQ | KSISGRSIKHMACLKDMLKSEITEIEEKQKKESLRKWDYYSKFSDEILFRRNLNVSANH |
| ID | DANACYGCNPCAFLKEVYGFRIERRNNERIISYRRGLAGCKSCVQSTGYPPIEFVRRKF |
| NO: | GADKAMEIVREVLHRRNWGALARNIGREKEADPILGELNELLLVDARPYFGNKSAAN |
| 126 | ETNLAFNVITRAAKKFRDEGMYDIHKQLDIHSEEGKVPKGRKSRLIRIERKHKAIHGLD |
| | PGETWRYPHCGKGEKYGVWLNRSRLIHIKGNEYRCLTAFGTTGRRMSLDVACSVLGH |
| | PLVKKKRKKGKKTVDGTELWQIKKATETLPEDPIDCTFYLYAAKPTKDPFILKVGSLK |
| | APRWKKLHKDFFEYSDTEKTQGQEKGKRVVRRGKVPRILSLRPDAKFKVSIWDDPYN |
| | GKNKEGTLLRMELSGLDGAKKPLILKRYGEPNTKPKNFVFWRPHITPHPLTFTPKHDF |
| | GDPNKKTKRRRVFNREYYGHLNDLAKMEPNAKFFEDREVSNKKNPKAKNIRIQAKES |
| | LPNIVAKNGRWAAFDPNDSLWKLYLHWRGRRKTIKGGISQEFQEFKERLDLYKKHED |
| | ESEWKEKEKLWENHEKEWKKTLEIHGSIAEVSQRCVMQSMMGPLDGLVQKKDYVHI |
| | GQSSLKAADDAWTFSANRYKKATGPKWGKISVSNLLYDANQANAELISQSISKYLSK |
| | QKDNQGCEGRKMKFLIKIIEPLRENFVKHTRWLHEMTQKDCEVRAQFSRVSM |
| SEQ | FPSDVGADALKHVRMLQPRLTDEVRKVALTRAPSDRPALARFAAVAQDGLAFVRHL |
| ID | NVSANHDSNCTFPRDPRDPRRGPCEPNPCAFLREVWGFRIVARGNERALSYRRGLAGC |
| NO: | KSCVQSTGFPSVPFHRIGADDCMRKLHEILKARNWRLLARNIGREREADPLLTELSEYL |
| 127 | LVDARTYPDGAAPNSGRLAENVIKRAAKKFRDEGMRDIHAQLRVHSREGKVPKGRL |
| | QRLRRIERKHRAIHALDPGPSWEAEGSARAEVQGVAVYRSQLLRVGHHTQQIEPVGIV |
| | ARTLFGVGRTDLDVAVSVLGAPLTKRKKGSKTLESTEDFRIAKARETRAEDKIEVAFV |
| | LYPTASLLRDEIPKDAFPAMRIDRFLLKVGSVQADREILLQDDYYRFGDAEVKAGKNK |
| | GRTVTRPVKVPRLQALRPDAKFRVNVWADPFGAGDSPGTLLRLEVSGVTRRSQPLRL |
| | LRYGQPSTQPANFLCWRPHRVPDPMTFTPRQKFGERRKNRRTRRPRVFERLYQVHIKH |
| | LAHLEPNRKWFEEARVSAQKWAKARAIRRKGAEDIPVVAPPAKRRWAALQPNAELW |
| | DLYAHDREARKRFRGGRAAEGEEFKPRLNLYLAHEPEAEWESKRDRWERYEKKWTA |
| | VLEEHSRMCAVADRTLPQFLSDPLGARMDDKDYAFVGKSALAVAEAFVEEGTVERA |
| | QGNCSITAKKKFASNASRKRLSVANLLDVSDKADRALVFQAVRQYVQRQAENGGVE |
| | GRRMAFLRKLLAPLRQNFVCHTRWLHM |
| SEQ | AARKKKRGKIGITVKAKEKSPPAAGPFMARKLVNVAANVDGVEVHLCVECEADAHG |
| ID | SASARLLGGCRSCTGSIGAEGRLMGSVDVDRERVIAEPVHTETERLGPDVKAFEAGTA |
| NO: | ESKYAIQRGLEYWGVDLISRNRARTVRKMEEADRPESSTMEKTSWDEIAIKTYSQAYH |
| 128 | ASENHLFWERQRRVRQHALALFRRARERNRGESPLQSTQRPAPLVLAALHAEAAAIS |
| | GRARAEYVLRGPSANVRAAAADIDAKPLGHYKTPSPKVARGFPVKRDLLRARHRIVG |
| | LSRAYFKPSDVVRGTSDAIAHVAGRNIGVAGGKPKEIEKTFTLPFVAYWEDVDRVVH |
| | CSSFKADGPWVRDQRIKIRGVSSAVGTFSLYGLDVAWSKPTSFYIRCSDIRKKFHPKGF |
| | GPMKHWRQWAKELDRLTEQRASCVVRALQDDEELLQTMERGQRYYDVFSCAATHA |
| | TRGEADPSGGCSRCELVSCGVAHKVTKKAKGDTGIEAVAVAGCSLCESKLVGPSKPR |
| | VHRQMAALRQSHALNYLRRLQREWEALEAVQAPTPYLRFKYARHLEVRSM |
| SEQ | AAKKKKQRGKIGISVKPKEGSAPPADGPFMARKLVNVAANVDGVEVNLCIECEADAH |
| ID | GSAPARLLGGCKSCTGSIGAEGRLMGSVDVDRADAIAKPVNTETEKLGPDVQAFEAG |
| NO: | TAETKYALQRGLEYWGVDLISRNRSRTVRRTEEGQPESATMEKTSWDEIAIKSYTRAY |
| 129 | HASENHLFWERQRRVRQHALALFKRAKERNRGDSTLPREPGHGLVAIAALACEAYAV |
| | GGRNLAETVVRGPTFGTARAVRDVEIASLGRYKTPSPKVAHGSPVKRDFLRARHRIVG |
| | LARAYYRPSDVVRGTSDAIAHVAGRNIGVAGGKPRAVEAVFTLPFVAYWEDVDRVV |
| | HCSSFQVSAPWNRDQRMKIAGVTTAAGTFSLHGGELKWAKPTSFYIRCSDTRRKFRP |
| | KGFGPMKRWRQWAKDLDRLVEQRASCVVRALQDDAALLETMERGQRYYDVFACA |
| | VTHATRGEADRLAGCSRCALTPCQEAHRVTTKPRGDAGVEQVQTSDCSLCEGKLVGP |
| | SKPRLHRTLTLLRQEHGLNYLRRLQREWESLEAVQVPTPYLRFKYARHLEVRSM |
| SEQ | TDSQSESVPEVVYALTGGEVPGRVPPDGGSAEGARNAPTGLRKQRGKIKISAKPSKPG |
| ID | SPASSLARTLVNEAANVDGVQSSGCATCRMRANGSAPRALPIGCVACASSIGRAPQEE |
| NO: | TVCALPTTQGPDVRLLEGGHALRKYDIQRALEYWGVDLIGRNLDRQAGRGMEPAEG |
| 130 | ATATMKRVSMDELAVLDFGKSYYASEQHLFAARQRRVRQHAKALKIRAKHANRSGS |
| | VKRALDRSRKQVTALAREFFKPSDVVRGDSDALAHVVGRNLGVSRHPAREIPQTFTLP |
| | LCAYWEDVDRVISCSSLLAGEPFARDQEIRIEGVSSALGSLRLYRGAIEWHKPTSLYIR |
| | CSDTRRKFRPRGGLKKRWRQWAKDLDRLVEQRACCIVRSLQADVELLQTMERAQRF |
| | YDVHDCAATHVGPVAVRCSPCAGKQFDWDRYRLLAALRQEHALNYLRRLQREWES |
| | LEAQQVKMPYLRFKYARKLEVSGPLIGLEVRREPSMGTAIAEM |
| SEQ | AGTAGRRHGSLGARRSINIAGVTDRHGRWGCESCVYTRDQAGNRARCAPCDQSTYA |
| ID | PDVQEVTIGQRQAKYTIFLTLQSFSWTNTMRNNKRAAAGRSKRTTGKRIGQLAEIKIT |
| NO: | GVGLAHAHNVIQRSLQHNITKMWRAEKGKSKRVARLKKAKQLTKRRAYFRRRMSR |
| 131 | QSRGNGFFRTGKGGIHAVAPVKIGLDVGMIASGSSEPADEQTVTLDAIWKGRKKKIRL |
| | IGAKGELAVAACRFREQQTKGDKCIPLILQDGEVRWNQNNWQCHPKKLVPLCGLEVS |
| | RKFVSQADRLAQNKVASPLAARFDKTSVKGTLVESDFAAVLVNVTSIYQQCHAMLLR |
| | SQEPTPSLRVQRTITSM |
| SEQ | GVRFSPAQSQVFFRTVIPQSVEARFAINMAAIHDAAGAFGCSVCRFEDRTPRNAKAVH |
| ID | GCSPCTRSTNRPDVFVLPVGAIKAKYDVFMRLLGFNWTHLNRRQAKRVTVRDRIGQL |
| NO: | DELAISMLTGKAKAVLKKSICHNVDKSFKAMRGSLKKLHRKASKTGKSQLRAKLSDL |
| 132 | RERTNTTQEGSHVEGDSDVALNKIGLDVGLVGKPDYPSEESVEVVVCLYFVGKVLILD |
| | AQGRIRDMRAKQYDGFKIPIIQRGQLTVLSVKDLGKWSLVRQDYVLAGDLRFEPKISK |
| | DRKYAECVKRIALITLQASLGFKERIPYYVTKQVEIKNASHIAFVTEAIQNCAENFREM |
| | TEYLMKYQEKSPDLKVLLTQLM |
| SEQ | RAVVGKVFLEQARRALNLATNFGTNHRTGCNGCYVTPGKLSIPQDGEKNAAGCTSCL |
| ID | MKATASYVSYPKPLGEKVAKYSTLDALKGFPWYSLRLNLRPNYRGKPINGVQEVAPV |
| NO: | SKFRLAEEVIQAVQRYHFTELEQSFPGGRRRLRELRAFYTKEYRRAPEQRQHVVNGDR |
| 133 | NIVVVTVLHELGFSVGMFNEVELLPKTPIECAVNVFIRGNRVLLEVRKPQFDKERLLVE |
| | SLWKKDSRRHTAKWTPPNNEGRIFTAEGWKDFQLPLLLGSTSRSLRAIEKEGFVQLAP |
| | GRDPDYNNTIDEQHSGRPFLPLYLYLQGTISQEYCVFAGTWVIPFQDGISPYSTKDTFQ |
| | PDLKRKAYSLLLDAVKHRLGNKVASGLQYGRFPAIEELKRLVRMHGATRKIPRGEKD |
| | LLKKGDPDTPEWWLLEQYPEFWRLCDAAAKRVSQNVGLLLSLKKQPLWQRRWLESR |
| | TRNEPLDNLPLSMALTLHLTNEEAL |
| SEQ | AAVYSKFYIENHFKMGIPETLSRIRGPSIIQGFSVNENYINIAGVGDRDFIFGCKKCKYT |
| ID | RGKPSSKKINKCHPCKRSTYPEPVIDVRGSISEFKYKIYNKLKQEPNQSIKQNTKGRMN |
| NO: | PSDHTSSNDGIIINGIDNRIAYNVIFSSYKHLMEKQINLLRDTTKRKARQIKKYNNSGKK |
| 134 | KHSLRSQTKGNLKNRYHMLGMFKKGSLTITNEGDFITAVRKVGLDISLYKNESLNKQE |
| | VETELCLNIKWGRTKSYTVSGYIPLPINIDWKLYLFEKETGLTLRLFGNKYKIQSKKFLI |
| | AQLFKPKRPPCADPVVKKAQKWSALNAHVQQMAGLFSDSHLLKRELKNRMHKQLD |
| | FKSLWVGTEDYIKWFEELSRSYVEGAEKSLEFFRQDYFCFNYTKQTTM |
| SEQ | PQQQRDLMLMAANYDQDYGNGCGPCTVVASAAYRPDPQAQHGCKRHLRTLGASAV |
| ID | THVGLGDRTATITALHRLRGPAALAARARAAQAASAPMTPDTDAPDDRRRLEAIDAD |
| NO: | DVVLVGAHRALWSAVRRWADDRRAALRRRLHSEREWLLKDQIRWAELYTLIEASGT |
| 135 | PPQGRWRNTLGALRGQSRWRRVLAPTMRATCAETHAELWDALAELVPEMAKDRRG |
| | LLRPPVEADALWRAPMIVEGWRGGHSVVVDAVAPPLDLPQPCAWTAVRLSGDPRQR |
| | WGLHLAVPPLGQVQPPDPLKATLAVSMRHRGGVRVRTLQAMAVDADAPMQRHLQV |
| | PLTLQRGGGLQWGIHSRGVRRREARSMASWEGPPIWTGLQLVNRWKGQGSALLAPD |
| | RPPDTPPYAPDAAVAPAQPDTKRARRTLKEACTVCRCAPGHMRQLQVTLTGDGTWR |
| | RFRLRAPQGAKRKAEVLKVATQHDERIANYTAWYLKRPEHAAGCDTCDGDSRLDGA |
| | CRGCRPLLVGDQCFRRYLDKIEADRDDGLAQIKPKAQEAVAAMAAKRDARAQKVAA |
| | RAAKLSEATGQRTAATRDASHEARAQKELEAVATEGTTVRHDAAAVSAFGSWVARK |
| | GDEYRHQVGVLANRLEHGLRLQELMAPDSVVADQQRASGHARVGYRYVLTAM |
| SEQ | AVAHPVGRGNAGSPGARGPEELPRQLVNRASNVTRPATYGCAPCRHVRLSIPKPVLTG |
| ID | CRACEQTTHPAPKRAVRGGADAAKYDLAAFFAGWAADLEGRNRRRQVHAPLDPQP |
| NO: | DPNHEPAVTLQKIDLAEVSIEEFQRVLARSVKHRHDGRASREREKARAYAQVAKKRR |
| 136 | NSHAHGARTRRAVRRQTRAVRRAHRMGANSGEILVASGAEDPVPEAIDHAAQLRRRI |
| | RACARDLEGLRHLSRRYLKTLEKPCRRPRAPDLGRARCHALVESLQAAERELEELRRC |
| | DSPDTAMRRLDAVLAAAASTDATFATGWTVVGMDLGVAPRGSAAPEVSPMEMAISV |
| | FWRKGSRRVIVSKPIAGMPIRRHELIRLEGLGTLRLDGNHYTGAGVTKGRGLSEGTEP |
| | DFREKSPSTLGFTLSDYRHESRWRPYGAKQGKTARQFFAAMSRELRALVEHQVLAPM |
| | GPPLLEAHERRFETLLKGQDNKSIHAGGGGRYVWRGPPDSKKRPAADGDWFRFGRG |
| | HADHRGWANKRHELAANYLQSAFRLWSTLAEAQEPTPYARYKYTRVTM |
| SEQ | WDFLTLQVYERHTSPEVCVAGNSTKCASGTRKSDHTHGVGVKLGAQEINVSANDDR |
| ID | DHEVGCNICVISRVSLDIKGWRYGCESCVQSTPEWRSIVRFDRNHKEAKGECLSRFEY |
| NO: | WGAQSIARSLKRNKLMGGVNLDELAIVQNENVVKTSLKHLFDKRKDRIQANLKAVK |
| 137 | VRMRERRKSGRQRKALRRQCRKLKRYLRSYDPSDIKEGNSCSAFTKLGLDIGISPNKPP |
| | KIEPKVEVVFSLFYQGACDKIVTVSSPESPLPRSWKIKIDGIRALYVKSTKVKFGGRTFR |
| | AGQRNNRRKVRPPNVKKGKRKGSRSQFFNKFAVGLDAVSQQLPIASVQGLWGRAET |
| | KKAQTICLKQLESNKPLKESQRCLFLADNWVVRVCGFLRALSQRQGPTPYIRYRYRCN |
| | M |
| SEQ | ARNVGQRNASRQSKRESAKARSRRVTGGHASVTQGVALINAAANADRDHTTGCEPC |
| ID | TWERVNLPLQEVIHGCDSCTKSSPFWRDIKVVNKGYREAKEEIMRIASGISADHLSRAL |
| NO: | SHNKVMGRLNLDEVCILDFRTVLDTSLKHLTDSRSNGIKEHIRAVHRKIRMRRKSGKT |
| 138 | ARALRKQYFALRRQWKAGHKPNSIREGNSLTALRAVGFDVGVSEGTEPMPAPQTEVV |
| | LSVFYKGSATRILRISSPHPIAKRSWKVKIAGIKALKLIRREHDFSFGRETYNASQRAEK |
| | RKFSPHAARKDFFNSFAVQLDRLAQQLCVSSVENLWVTEPQQKLLTLAKDTAPYGIRE |
| | GARFADTRARLAWNWVFRVCGFTRALHQEQEPTPYCRFTWRSKM |

[0116] In some embodiments, the Type V CRISPR/Cas enzyme is a CasΦ nuclease. A CasΦ polypeptide can function as an endonuclease that catalyzes cleavage at a specific sequence in a target nucleic acid. A programmable CasΦ nuclease of the present disclosure may have a single active site in a RuvC domain that is capable of catalyzing pre-crRNA processing and nicking or cleaving of nucleic acids. This compact catalytic site may render the programmable CasΦ nuclease especially advantageous for genome engineering and new functionalities for genome manipulation.

[0117] TABLE 4 provides amino acid sequences of illustrative CasΦ polypeptides that can be used in compositions and methods of the disclosure.

TABLE 4
CasΦ Amino Acid Sequences

| | SEQ ID | |
|---|---|---|
| Name | NO | Amino Acid Sequence |
| CasΦ.l | SEQ ID | MADTPTLFTQFLRHHLPGQRFRKDILKQAGRILANKGEDATIA |
| | NO: 139 | FLRGKSEESPPDFQPPVKCPIIACSRPLTEWPIYQASVAIQGYV |
| | | YGQSLAEFEASDPGCSKDGLLGWFDKTGVCTDYFSVQGLNLI |
| | | FQNARKRYIGVQTKVTNRNEKRHKKLKRINAKRIAEGLPELT |
| | | SDEPESALDETGHLIDPPGLNTNIYCYQQVSPKPLALSEVNQLP |
| | | TAYAGYSTSGDDPIQPMVTKDRLSISKGQPGYIPEHQRALLSQ |
| | | KKHRRMRGYGLKARALLVIVRIQDDWAVIDLRSLLRNAYWR |
| | | RIVQTKEPSTITKLLKLVTGDPVLDATRMVATFTYKPGIVQVR |
| | | SAKCLKNKQGSKLFSERYLNETVSVTSIDLGSNNLVAVATYR |
| | | LVNGNTPELLQRFTLPSHLVKDFERYKQAHDTLEDSIQKTAV |
| | | ASLPQGQQTEIRMWSMYGFREAQERVCQELGLADGSIPWNV |
| | | MTATSTILTDLFLARGGDPKKCMFTSEPKKKKNSKQVLYKIR |
| | | DRAWAKMYRTLLSKETREAWNKALWGLKRGSPDYARLSKR |
| | | KEELARRCVNYTISTAEKRAQCGRTIVALEDLNIGFFHGRGKQ |
| | | EPGWVGLFTRKKENRWLMQALHKAFLELAHHRGYHVIEVNP |
| | | AYTSQTCPVCRHCDPDNRDQHNREAFHCIGCGFRGNADLDV |
| | | ATHNIAMVAITGESLKRARGSVASKTPQPLAAE |
| CasΦ.2 | SEQ ID | MPKPAVESEFSKVLKKHFPGERFRSSYMKRGGKILAAQGEEA |
| | NO: 140 | VVAYLQGKSEEEPPNFQPPAKCHVVTKSRDFAEWPIMKASEA |
| | | IQRYIYALSTTERAACKPGKSSESHAAWFAATGVSNHGYSHV |
| | | QGLNLIFDHTLGRYDGVLKKVQLRNEKARARLESINASRADE |
| | | GLPEIKAEEEEVATNETGHLLQPPGINPSFYVYQTISPQAYRPR |
| | | DEIVLPPEYAGYVRDPNAPIPLGVVRNRCDIQKGCPGYIPEWQ |
| | | REAGTAISPKTGKAVTVPGLSPKKNKRMRRYWRSEKEKAQD |
| | | ALLVTVRIGTDWVVIDVRGLLRNARWRTIAPKDISLNALLDLF |
| | | TGDPVIDVRRNIVTFTYTLDACGTYARKWTLKGKQTKATLD |
| | | KLTATQTVALVAIDLGQTNPISAGISRVTQENGALQCEPLDRF |
| | | TLPDDLLKDISAYRIAWDRNEEELRARSVEALPEAQQAEVRA |
| | | LDGVSKETARTQLCADFGLDPKRLPWDKMSSNTTFISEALLS |
| | | NSVSRDQVFFTPAPKKGAKKKAPVEVMRKDRTWARAYKPRL |
| | | SVEAQKLKNEALWALKRTSPEYLKLSRRKEELCRRSINYVIEK |
| | | TRRRTQCQIVIPVIEDLNVRFFHGSGKRLPGWDNFFTAKKENR |
| | | WFIQGLHKAFSDLRTHRSFYVFEVRPERTSITCPKCGHCEVGN |
| | | RDGEAFQCLSCGKTCNADLDVATHNLTQVALTGKTMPKREE |
| | | PRDAQGTAPARKTKKASKSKAPPAEREDQTPAQEPSQTS |
| CasΦ.3 | SEQ ID | MYILEMADLKSEPSLLAKLLRDRFPGKYWLPKYWKLAEKKR |
| | NO: 141 | LTGGEEAACEYMADKQLDSPPPNFRPPARCVILAKSRPFEDW |
| | | PVHRVASKAQSFVIGLSEQGFAALRAAPPSTADARRDWLRSH |
| | | GASEDDLMALEAQLLETIMGNAISLHGGVLKKIDNANVKAA |
| | | KRLSGRNEARLNKGLQELPPEQEGSAYGADGLLVNPPGLNLN |
| | | IYCRKSCCPKPVKNTARFVGHYPGYLRDSDSILISGTMDRLTII |
| | | EGMPGHIPAWQREQGLVKPGGRRRRLSGSESNMRQKVDPST |
| | | GPRRSTRSGTVNRSNQRTGRNGDPLLVEIRMKEDWVLLDAR |
| | | GLLRNLRWRESKRGLSCDHEDLSLSGLLALFSGDPVIDPVRNE |
| | | VVFLYGEGIIPVRSTKPVGTRQSKKLLERQASMGPLTLISCDL |
| | | GQTNLIAGRASAISLTHGSLGVRSSVRIELDPEIIKSFERLRKDA |
| | | DRLETEILTAAKETLSDEQRGEVNSHEKDSPQTAKASLCRELG |
| | | LHPPSLPWGQMGPSTTFIADMLISHGRDDDAFLSHGEFPTLEK |
| | | RKKFDKRFCLESRPLLSSETRKALNESLWEVKRTSSEYARLSQ |
| | | RKKEMARRAVNFVVEISRRKTGLSNVIVNIEDLNVRIFHGGG |
| | | KQAPGWDGFFRPKSENRWFIQAIHKAFSDLAAHHGIPVIESDP |
| | | QRTSMTCPECGHCDSKNRNGVRFLCKGCGASMDADFDAACR |
| | | NLERVALTGKPMPKPSTSCERLLSATTGKVCSDHSLSHDAIEK |
| | | AS |
| CasΦ.4 | SEQ ID | MEKEITELTKIRREFPNKKFSSTDMKKAGKLLKAEGPDAVRD |
| | NO: 142 | FLNSCQEIIGDFKPPVKTNIVSISRPFEEWPVSMVGRAIQEYYFS |
| | | LTKEELESVHPGTSSEDHKSFFNITGLSNYNYTSVQGLNLIFKN |
| | | AKAIYDGTLVKANNKNKKLEKKFNEINHKRSLEGLPIITPDFE |
| | | EPFDENGHLNNPPGINRNIYGYQGCAAKVFVPSKHKMVSLPK |
| | | EYEGYNRDPNLSLAGFRNRLEIPEGEPGHVPWFQRMDIPEGQI |
| | | GHVNKIQRFNFVHGKNSGKVKFSDKTGRVKRYHHSKYKDAT |
| | | KPYKFLEESKKVSALDSILAIITIGDDWVVFDIRGLYRNVFYRE |
| | | LAQKGLTAVQLLDLFTGDPVIDPKKGVVTFSYKEGVVPVFSQ |
| | | KIVPRFKSRDTLEKLTSQGPVALLSVDLGQNEPVAARVCSLK |
| | | NINDKITLDNSCRISFLDDYKKQIKDYRDSLDELEIKIRLEAINS |
| | | LETNQQVEIRDLDVFSADRAKANTVDMFDIDPNLISWDSMSD |
| | | ARVSTQISDLYLKNGGDESRVYFEINNKRIKRSDYNISQLVRP |
| | | KLSDSTRKNLNDSIWKLKRTSEEYLKLSKRKLELSRAVVNYTI |
| | | RQSKLLSGINDIVIILEDLDVKKKFNGRGIRDIGWDNFFSSRKE |
| | | NRWFIPAFHKAFSELSSNRGLCVIEVNPAWTSATCPDCGFCSK |
| | | ENRDGINFTCRKCGVSYHADIDVATLNIARVAVLGKPMSGPA |
| | | DRERLGDTKKPRVARSRKTMKRKDISNSTVEAMVTA |
| CasΦ.5 | SEQ ID | MDMLDTETNYATETPAQQQDYSPKPPKKAQRAPKGFSKKAR |
| | NO: 143 | PEKKPPKPITLFTQKHFSGVRFLKRVIRDASKILKLSESRTITFL |
| | | EQAIERDGSAPPDVTPPVHNTIMAVTRPFEEWPEVILSKALQK |
| | | HCYALTKKIKIKTWPKKGPGKKCLAAWSARTKIPLIPGQVQA |
| | | TNGLFDRIGSIYDGVEKKVTNRNANKKLEYDEAIKEGRNPAV |
| | | PEYETAYNIDGTLINKPGYNPNLYITQSRTPRLITEADRPLVEKI |
| | | LWQMVEKKTQSRNQARRARLEKAAHLQGLPVPKFVPEKVD |
| | | RSQKIEIRIIDPLDKIEPYMPQDRMAIKASQDGHVPYWQRPFLS |
| | | KRRNRRVRAGWGKQVSSIQAWLTGALLVIVRLGNEAFLADIR |
| | | GALRNAQWRKLLKPDATYQSLFNLFTGDPVVNTRTNHLTMA |
| | | YREGVVNIVKSRSFKGRQTREHLLTLLGQGKTVAGVSFDLGQ |
| | | KHAAGLLAAHFGLGEDGNPVFTPIQACFLPQRYLDSLTNYRN |
| | | RYDALTLDMRRQSLLALTPAQQQEFADAQRDPGGQAKRACC |
| | | LKLNLNPDEIRWDLVSGISTMISDLYIERGGDPRDVHQQVETK |
| | | PKGKRKSEIRILKIRDGKWAYDFRPKIADETRKAQREQLWKL |
| | | QKASSEFERLSRYKINIARAIANWALQWGRELSGCDIVIPVLE |
| | | DLNVGSKFFDGKGKWLLGWDNRFTPKKENRWFIKVLHKAV |
| | | AELAPHRGVPVYEVMPHRTSMTCPACHYCHPTNREGDRFEC |
| | | QSCHVVKNTDRDVAPYNILRVAVEGKTLDRWQAEKKPQAEP |
| | | DRPMILIDNQES |
| CasΦ.6 | SEQ ID | MDMLDTETNYATETPAQQQDYSPKPPKKAQRAPKGFSKKAR |
| | NO: 144 | PEKKPPKPITLFTQKHFSGVRFLKRVIRDASKILKLSESRTITFL |
| | | EQAIERDGSAPPDVTPPVHNTIMAVTRPFEEWPEVILSKALQK |
| | | HCYALTKKIKIKTWPKKGPGKKCLAAWSARTKIPLIPGQVQA |
| | | TNGLFDRIGSIYDGVEKKVTNRNANKKLEYDEAIKEGRNPAV |
| | | PEYETAYNIDGTLINKPGYNPNLYITQSRTPRLITEADRPLVEKI |
| | | LWQMVEKKTQSRNQARRARLEKAAHLQGLPVPKFVPEKVD |
| | | RSQKIEIRIIDPLDKIEPYMPQDRMAIKASQDGHVPYWQRPFLS |
| | | KRRNRRVRAGWGKQVSSIQAWLTGALLVIVRLGNEAFLADIR |
| | | GALRNAQWRKLLKPDATYQSLFNLFTGDPVVNTRTNHLTMA |
| | | YREGVVDIVKSRSFKGRQTREHLLTLLGQGKTVAGVSFDLGQ |
| | | KHAAGLLAAHFGLGEDGNPVFTPIQACFLPQRYLDSLTNYRN |
| | | RYDALTLDMRRQSLLALTPAQQQEFADAQRDPGGQAKRACC |
| | | LKLNLNPDEIRWDLVSGISTMISDLYIERGGDPRDVHQQVETK |
| | | PKGKRKSEIRILKIRDGKWAYDFRPKIADETRKAQREQLWKL |
| | | QKASSEFERLSRYKINIARAIANWALQWGRELSGCDIVIPVLE |
| | | DLNVGSKFFDGKGKWLLGWDNRFTPKKENRWFIKVLHKAV |
| | | AELAPHKGVPVYEVMPHRTSMTCPACHYCHPTNREGDRFEC |
| | | QSCHVVKNTDRDVAPYNILRVAVEGKTLDRWQAEKKPQAEP |
| | | DRPMILIDNQES |
| CasΦ.7 | SEQ ID | MSSLPTPLELLKQKHADLFKGLQFSSKDNKMAGKVLKKDGE |
| | NO: 145 | EAALAFLSERGVSRGELPNFRPPAKTLVVAQSRPFEEFPIYRVS |
| | | EAIQLYVYSLSVKELETVPSGSSTKKEHQRFFQDSSVPDFGYT |
| | | SVQGLNKIFGLARGIYLGVITRGENQLQKAKSKHEALNKKRR |
| | | ASGEAETEFDPTPYEYMTPERKLAKPPGVNHSIMCYVDISVDE |
| | | FDFRNPDGIVLPSEYAGYCREINTAIEKGTVDRLGHLKGGPGY |
| | | IPGHQRKESTTEGPKINFRKGRIRRSYTALYAKRDSRRVRQGK |
| | | LALPSYRHHMMRLNSNAESAILAVIFFGKDWVVFDLRGLLRN |
| | | VRWRNLFVDGSTPSTLLGMFGDPVIDPKRGVVAFCYKEQIVP |
| | | VVSKSITKMVKAPELLNKLYLKSEDPLVLVAIDLGQTNPVGV |
| | | GVYRVMNASLDYEVVTRFALESELLREIESYRQRTNAFEAQIR |
| | | AETFDAMTSEEQEEITRVRAFSASKAKENVCHRFGMPVDAVD |
| | | WATMGSNTIHIAKWVMRHGDPSLVEVLEYRKDNEIKLDKNG |
| | | VPKKVKLTDKRIANLTSIRLRFSQETSKHYNDTMWELRRKHP |
| | | VYQKLSKSKADFSRRVVNSIIRRVNHLVPRARIVFIIEDLKNLG |
| | | KVFHGSGKRELGWDSYFEPKSENRWFIQVLHKAFSETGKHK |
| | | GYYIIECWPNWTSCTCPKCSCCDSENRHGEVFRCLACGYTCN |
| | | TDFGTAPDNLVKIATTGKGLPGPKKRCKGSSKGKNPKIARSSE |
| | | TGVSVTESGAPKVKKSSPTQTSQSSSQSAP |
| CasΦ.8 | SEQ ID | MNKIEKEKTPLAKLMNENFAGLRFPFAIIKQAGKKLLKEGEL |
| | NO: 146 | KTIEYMTGKGSIEPLPNFKPPVKCLIVAKRRDLKYFPICKASCE |
| | | IQSYVYSLNYKDFMDYFSTPMTSQKQHEEFFKKSGLNIEYQN |
| | | VAGLNLIFNNVKNTYNGVILKVKNRNEKLKKKAIKNNYEFEE |
| | | IKTFNDDGCLINKPGINNVIYCFQSISPKILKNITHLPKEYNDYD |
| | | CSVDRNIIQKYVSRLDIPESQPGHVPEWQRKLPEFNNTNNPRR |
| | | RRKWYSNGRNISKGYSVDQVNQAKIEDSLLAQIKIGEDWIILD |
| | | IRGLLRDLNRRELISYKNKLTIKDVLGFFSDYPIIDIKKNLVTFC |
| | | YKEGVIQVVSQKSIGNKKSKQLLEKLIENKPIALVSIDLGQTNP |
| | | VSVKISKLNKINNKISIESFTYRFLNEEILKEIEKYRKDYDKLEL |
| | | KLINEA |
| CasΦ.9 | SEQ ID | MDMLDTETNYATETPSQQQDYSPKPPKKDRRAPKGFSKKAR |
| | NO: 147 | PEKKPPKPITLFTQKHFSGVRFLKRVIRDASKILKLSESRTITFL |
| | | EQAIERDGSAPPDVTPPVHNTIMAVTRPFEEWPEVILSKALQK |
| | | HCYALTKKIKIKTWPKKGPGKKCLAAWSARTKIPLIPGQVQA |
| | | TNGLFDRIGSIYDGVEKKVTNRNANKKLEYDEAIKEGRNPAV |
| | | PEYETAYNIDGTLINKPGYNPNLYITQSRTPRLITEADRPLVEKI |
| | | LWQMVEKKTQSRNQARRARLEKAAHLQGLPVPKFVPEKVD |
| | | RSQKIEIRIIDPLDKIEPYMPQDRMAIKASQDGHVPYWQRPFLS |
| | | KRRNRRVRAGWGKQVSSIQAWLTGALLVIVRLGNEAFLADIR |
| | | GALRNAQWRKLLKPDATYQSLFNLFTGDPVVNTRTNHLTMA |
| | | YREGVVDIVKSRSFKGRQTREHLLTLLGQGKTVAGVSFDLGQ |
| | | KHAAGLLAAHFGLGEDGNPVFTPIQACFLPQRYLDSLTNYRN |
| | | RYDALTLDMRRQSLLALTPAQQQEFADAQRDPGGQAKRACC |
| | | LKLNLNPDEIRWDLVSGISTMISDLYIERGGDPRDVHQQVETK |
| | | PKGKRKSEIRILKIRDGKWAYDFRPKIADETRKAQREQLWKL |
| | | QKASSEFERLSRYKINIARAIANWALQWGRELSGCDIVIPVLE |
| | | DLNVGSKFFDGKGKWLLGWDNRFTPKKENRWFIKVLHKAV |
| | | AELAPHRGVPVYEVMPHRTSMTCPACHYCHPTNREGDRFEC |
| | | QSCHVVKNTDRDVAPYNILRVAVEGKTLDRWQAEKKPQAEP |
| | | DRPMILIDNQES |
| CasΦ.10 | SEQ ID | MDMLDTETNYATETPSQQQDYSPKPPKKDRRAPKGFSKKAR |
| | NO: 148 | PEKKPPKPITLFTQKHFSGVRFLKRVIRDASKILKLSESRTITFL |
| | | EQAIERDGSAPPDVTPPVHNTIMAVTRPFEEWPEVILSKALQK |
| | | HCYALTKKIKIKTWPKKGPGKKCLAAWSARTKIPLIPGQVQA |
| | | TNGLFDRIGSIYDGVEKKVTNRNANKKLEYDEAIKEGRNPAV |
| | | PEYETAYNIDGTLINKPGYNPNLYITQSRTPRLITEADRPLVEKI |
| | | LWQMVEKKTQSRNQARRARLEKAAHLQGLPVPKFVPEKVD |
| | | RSQKIEIRIIDPLDKIEPYMPQDRMAIKASQDGHVPYWQRPFLS |
| | | KRRNRRVRAGWGKQVSSIQAWLTGALLVIVRLGNEAFLADIR |
| | | GALRNAQWRKLLKPDATYQSLFNLFTGDPVVNTRTNHLTMA |
| | | YREGVVNIVKSRSFKGRQTREHLLTLLGQGKTVAGVSFDLGQ |
| | | KHAAGLLAAHFGLGEDGNPVFTPIQACFLPQRYLDSLTNYRN |
| | | RYDALTLDMRRQSLLALTPAQQQEFADAQRDPGGQAKRACC |
| | | LKLNLNPDEIRWDLVSGISTMISDLYIERGGDPRDVHQQVETK |
| | | PKGKRKSEIRILKIRDGKWAYDFRPKIADETRKAQREQLWKL |
| | | QKASSEFERLSRYKINIARAIANWALQWGRELSGCDIVIPVLE |
| | | DLNVGSKFFDGKGKWLLGWDNRFTPKKENRWFIKVLHKAV |
| | | AELAPHRGVPVYEVMPHRTSMTCPACHYCHPTNREGDRFEC |
| | | QSCHVVKNTDRDVAPYNILRVAVEGKTLDRWQAEKKPQAEP |
| | | DRPMILIDNQES |
| CasΦ.11 | SEQ ID | MSNKTTPPSPLSLLLRAHFPGLKFESQDYKIAGKKLRDGGPEA |
| | NO: 149 | VISYLTGKGQAKLKDVKPPAKAFVIAQSRPFIEWDLVRVSRQI |
| | | QEKIFGIPATKGRPKQDGLSETAFNEAVASLEVDGKSKLNEET |
| | | RAAFYEVLGLDAPSLHAQAQNALIKSAISIREGVLKKVENRNE |
| | | KNLSKTKRRKEAGEEATFVEEKAHDERGYLIHPPGVNQTIPG |
| | | YQAVVIKSCPSDFIGLPSGCLAKESAEALTDYLPHDRMTIPKG |
| | | QPGYVPEWQHPLLNRRKNRRRRDWYSASLNKPKATCSKRSG |
| | | TPNRKNSRTDQIQSGRFKGAIPVLMRFQDEWVIIDIRGLLRNA |
| | | RYRKLLKEKSTIPDLLSLFTGDPSIDMRQGVCTFIYKAGQACS |
| | | AKMVKTKNAPEILSELTKSGPVVLVSIDLGQTNPIAAKVSRVT |
| | | QLSDGQLSHETLLRELLSNDSSDGKEIARYRVASDRLRDKLA |
| | | NLAVERLSPEHKSEILRAKNDTPALCKARVCAALGLNPEMIA |
| | | WDKMTPYTEFLATAYLEKGGDRKVATLKPKNRPEMLRRDIK |
| | | FKGTEGVRIEVSPEAAEAYREAQWDLQRTSPEYLRLSTWKQE |
| | | LTKRILNQLRHKAAKSSQCEVVVMAFEDLNIKMMHGNGKW |
| | | ADGGWDAFFIKKRENRWFMQAFHKSLTELGAHKGVPTIEVT |
| | | PHRTSITCTKCGHCDKANRDGERFACQKCGFVAHADLEIATD |
| | | NIERVALTGKPMPKPESERSGDAKKSVGARKAAFKPEEDAEA |
| | | AE |
| CasΦ.12 | SEQ ID | MIKPTVSQFLTPGFKLIRNHSRTAGLKLKNEGEEACKKFVREN |
| | NO: 150 | EIPKDECPNFQGGPAIANIIAKSREFTEWEIYQSSLAIQEVIFTLP |
| | | KDKLPEPILKEEWRAQWLSEHGLDTVPYKEAAGLNLIIKNAV |
| | | NTYKGVQVKVDNKNKNNLAKINRKNEIAKLNGEQEISFEEIK |
| | | AFDDKGYLLQKPSPNKSIYCYQSVSPKPFITSKYHNVNLPEEYI |
| | | GYYRKSNEPIVSPYQFDRLRIPIGEPGYVPKWQYTFLSKKENK |
| | | RRKLSKRIKNVSPILGIICIKKDWCVFDMRGLLRTNHWKKYH |
| | | KPTDSINDLFDYFTGDPVIDTKANVVRFRYKMENGIVNYKPV |
| | | REKKGKELLENICDQNGSCKLATVDVGQNNPVAIGLFELKKV |
| | | NGELTKTLISRHPTPIDFCNKITAYRERYDKLESSIKLDAIKQLT |
| | | SEQKIEVDNYNNNFTPQNTKQIVCSKLNINPNDLPWDKMISGT |
| | | HFISEKAQVSNKSEIYFTSTDKGKTKDVMKSDYKWFQDYKPK |
| | | LSKEVRDALSDIEWRLRRESLEFNKLSKSREQDARQLANWISS |
| | | MCDVIGIENLVKKNNFFGGSGKREPGWDNFYKPKKENRWWI |
| | | NAIHKALTELSQNKGKRVILLPAMRTSITCPKCKYCDSKNRN |
| | | GEKFNCLKCGIELNADIDVATENLATVAITAQSMPKPTCERSG |
| | | DAKKPVRARKAKAPEFHDKLAPSYTVVLREAV |
| CasΦ.13 | SEQ ID | MRQPAEKTAFQVFRQEVIGTQKLSGGDAKTAGRLYKQGKME |
| | NO: 151 | AAREWLLKGARDDVPPNFQPPAKCLVVAVSHPFEEWDISKTN |
| | | HDVQAYIYAQPLQAEGHLNGLSEKWEDTSADQHKLWFEKTG |
| | | VPDRGLPVQAINKIAKAAVNRAFGVVRKVENRNEKRRSRDN |
| | | RIAEHNRENGLTEVVREAPEVATNADGFLLHPPGIDPSILSYAS |
| | | VSPVPYNSSKHSFVRLPEEYQAYNVEPDAPIPQFVVEDRFAIPP |
| | | GQPGYVPEWQRLKCSTNKHRRMRQWSNQDYKPKAGRRAKP |
| | | LEFQAHLTRERAKGALLVVMRIKEDWVVFDVRGLLRNVEWR |
| | | KVLSEEAREKLTLKGLLDLFTGDPVIDTKRGIVTFLYKAEITKI |
| | | LSKRTVKTKNARDLLLRLTEPGEDGLRREVGLVAVDLGQTHP |
| | | IAAAIYRIGRTSAGALESTVLHRQGLREDQKEKLKEYRKRHT |
| | | ALDSRLRKEAFETLSVEQQKEIVTVSGSGAQITKDKVCNYLG |
| | | VDPSTLPWEKMGSYTHFISDDFLRRGGDPNIVHFDRQPKKGK |
| | | VSKKSQRIKRSDSQWVGRMRPRLSQETAKARMEADWAAQN |
| | | ENEEYKRLARSKQELARWCVNTLLQNTRCITQCDEIVVVIED |
| | | LNVKSLHGKGAREPGWDNFFTPKTENRWFIQILHKTFSELPK |
| | | HRGEHVIEGCPLRTSITCPACSYCDKNSRNGEKFVCVACGATF |
| | | HADFEVATYNLVRLATTGMPMPKSLERQGGGEKAGGARKA |
| | | RKKAKQVEKIVVQANANVTMNGASLHSP |
| CasΦ.14 | SEQ ID | MSSLPTPLELLKQKHADLFKGLQFSSKDNKMAGKVLKKDGE |
| | NO: 152 | EAALAFLSERGVSRGELPNFRPPAKTLVVAQSRPFEEFPIYRVS |
| | | EAIQLYVYSLSVKELETVPSGSSTKKEHQRFFQDSSVPDFGYT |
| | | SVQGLNKIFGLARGIYLGVITRGENQLQKAKSKHEALNKKRR |
| | | ASGEAETEFDPTPYEYMTPERKLAKPPGVNHSIMCYVDISVDE |
| | | FDFRNPDGIVLPSEYAGYCREINTAIEKGTVDRLGHLKGGPGY |
| | | IPGHQRKESTTEGPKINFRKGRIRRSYTALYAKRDSRRVRQGK |
| | | LALPSYRHHMMRLNSNAESAILAVIFFGKDWVVFDLRGLLRN |
| | | VRWRNLFVDGSTPSTLLGMFGDPVIDPKRGVVAFCYKEQIVP |
| | | VVSKSITKMVKAPELLNKLYLKSEDPLVLVAIDLGQTNPVGV |
| | | GVYRVMNASLDYEVVTRFALESELLREIESYRQRTNAFEAQIR |
| | | AETFDAMTSEEQEEITRVRAFSASKAKENVCHRFGMPVDAVD |
| | | WATMGSNTIHIAKWVMRHGDPSLVEVLEYRKDNEIKLDKNG |
| | | VPKKVKLTDKRIANLTSIRLRFSQETSKHYNDTMWELRRKHP |
| | | VYQKLSKSKADFSRRVVNSIIRRVNHLVPRARIVFIIEDLKNLG |
| | | KVFHGSGKRELGWDSYFEPKSENRWFIQVLHKAFSETGKHK |
| | | GYYIIECWPNWTSCTCPKCSCCDSENRHGEVFRCLACGYTCN |
| | | TDFGTAPDNLVKIATTGKGLPGPKKRCKGSSKGKNPKIARSSE |
| | | TGVSVTESGAPKVKKSSPTQTSQSSSQSAP |
| CasΦ.15 | SEQ ID | MIKPTVSQFLTPGFKLIRNHSRTAGLKLKNEGEEACKKFVREN |
| | NO: 153 | EIPKDECPNFQGGPAIANIIAKSREFTEWEIYQSSLAIQEVIFTLP |
| | | KDKLPEPILKEEWRAQWLSEHGLDTVPYKEAAGLNLIIKNAV |
| | | NTYKGVQVKVDNKNKNNLAKINRKNEIAKLNGEQEISFEEIK |
| | | AFDDKGYLLQKPSPNKSIYCYQSVSPKPFITSKYHNVNLPEEYI |
| | | GYYRKSNEPIVSPYQFDRLRIPIGEPGYVPKWQYTFLSKKENK |
| | | RRKLSKRIKNVSPILGIICIKKDWCVFDMRGLLRTNHWKKYH |
| | | KPTDSINDLFDYFTGDPVIDTKANVVRFRYKMENGIVNYKPV |
| | | REKKGKELLENICDQNGSCKLATVDVGQNNPVAIGLFELKKV |
| | | NGELTKTLISRHPTPIDFCNKITAYRERYDKLESSIKLDAIKQLT |
| | | SEQKIEVDNYNNNFTPQNTKQIVCSKLNINPNDLPWDKMISGT |
| | | HFISEKAQVSNKSEIYFTSTDKGKTKDVMKSDYKWFQDYKPK |
| | | LSKEVRDALSDIEWRLRRESLEFNKLSKSREQDARQLANWISS |
| | | MCDVIGIENLVKKNNFFGGSGKREPGWDNFYKPKKENRWWI |
| | | NAIHKALTELSQNKGKRVILLPAMRTSITCPKCKYCDSKNRN |
| | | GEKFNCLKCGIELNADIDVATENLATVAITAQSMPKPTCERSG |
| | | DAKKPVRARKAKAPEFHDKLAPSYTVVLREAV |
| CasΦ.16 | SEQ ID | MSNKTTPPSPLSLLLRAHFPGLKFESQDYKIAGKKLRDGGPEA |
| | NO: 154 | VISYLTGKGQAKLKDVKPPAKAFVIAQSRPFIEWDLVRVSRQI |
| | | QEKIFGIPATKGRPKQDGLSETAFNEAVASLEVDGKSKLNEET |
| | | RAAFYEVLGLDAPSLHAQAQNALIKSAISIREGVLKKVENRNE |
| | | KNLSKTKRRKEAGEEATFVEEKAHDERGYLIHPPGVNQTIPG |
| | | YQAVVIKSCPSDFIGLPSGCLAKESAEALTDYLPHDRMTIPKG |
| | | QPGYVPEWQHPLLNRRKNRRRRDWYSASLNKPKATCSKRSG |
| | | TPNRKNSRTDQIQSGRFKGAIPVLMRFQDEWVIIDIRGLLRNA |
| | | RYRKLLKEKSTIPDLLSLFTGDPSIDMRQGVCTFIYKAGQACS |
| | | AKMVKTKNAPEILSELTKSGPVVLVSIDLGQTNPIAAKVSRVT |
| | | QLSDGQLSHETLLRELLSNDSSDGKEIARYRVASDRLRDKLA |
| | | NLAVERLSPEHKSEILRAKNDTPALCKARVCAALGLNPEMIA |
| | | WDKMTPYTEFLATAYLEKGGDRKVATLKPKNRPEMLRRDIK |
| | | FKGTEGVRIEVSPEAAEAYREAQWDLQRTSPEYLRLSTWKQE |
| | | LTKRILNQLRHKAAKSSQCEVVVMAFEDLNIKMMHGNGKW |
| | | ADGGWDAFFIKKRENRWFMQAFHKSLTELGAHKGVPTIEVT |
| | | PHRTSITCTKCGHCDKANRDGERFACQKCGFVAHADLEIATD |
| | | NIERVALTGKPMPKPESERSGDAKKSVGARKAAFKPEEDAEA |
| | | AE |
| CasΦ.17 | SEQ ID | MYSLEMADLKSEPSLLAKLLRDRFPGKYWLPKYWKLAEKKR |
| | NO: 155 | LTGGEEAACEYMADKQLDSPPPNFRPPARCVILAKSRPFEDW |
| | | PVHRVASKAQSFVIGLSEQGFAALRAAPPSTADARRDWLRSH |
| | | GASEDDLMALEAQLLETIMGNAISLHGGVLKKIDNANVKAA |
| | | KRLSGRNEARLNKGLQELPPEQEGSAYGADGLLVNPPGLNLN |
| | | IYCRKSCCPKPVKNTARFVGHYPGYLRDSDSILISGTMDRLTII |
| | | EGMPGHIPAWQREQGLVKPGGRRRRLSGSESNMRQKVDPST |
| | | GPRRSTRSGTVNRSNQRTGRNGDPLLVEIRMKEDWVLLDAR |
| | | GLLRNLRWRESKRGLSCDHEDLSLSGLLALFSGDPVIDPVRNE |
| | | VVFLYGEGIIPVRSTKPVGTRQSKKLLERQASMGPLTLISCDL |
| | | GQTNLIAGRASAISLTHGSLGVRSSVRIELDPEIIKSFERLRKDA |
| | | DRLETEILTAAKETLSDEQRGEVNSHEKDSPQTAKASLCRELG |
| | | LHPPSLPWGQMGPSTTFIADMLISHGRDDDAFLSHGEFPTLEK |
| | | RKKFDKRFCLESRPLLSSETRKALNESLWEVKRTSSEYARLSQ |
| | | RKKEMARRAVNFVVEISRRKTGLSNVIVNIEDLNVRIFHGGG |
| | | KQAPGWDGFFRPKSENRWFIQAIHKAFSDLAAHHGIPVIESDP |
| | | QRTSMTCPECGHCDSKNRNGVRFLCKGCGASMDADFDAACR |
| | | NLERVALTGKPMPKPSTSCERLLSATTGKVCSDHSLSHDAIEK |
| | | AS |
| CasΦ.18 | SEQ ID | MEKEITELTKIRREFPNKKFSSTDMKKAGKLLKAEGPDAVRD |
| | NO: 156 | FLNSCQEIIGDFKPPVKTNIVSISRPFEEWPVSMVGRAIQEYYFS |
| | | LTKEELESVHPGTSSEDHKSFFNITGLSNYNYTSVQGLNLIFKN |
| | | AKAIYDGTLVKANNKNKKLEKKFNEINHKRSLEGLPIITPDFE |
| | | EPFDENGHLNNPPGINRNIYGYQGCAAKVFVPSKHKMVSLPK |
| | | EYEGYNRDPNLSLAGFRNRLEIPEGEPGHVPWFQRMDIPEGQI |
| | | GHVNKIQRFNFVHGKNSGKVKFSDKTGRVKRYHHSKYKDAT |
| | | KPYKFLEESKKVSALDSILAIITIGDDWVVFDIRGLYRNVFYRE |
| | | LAQKGLTAVQLLDLFTGDPVIDPKKGVVTFSYKEGVVPVFSQ |
| | | KIVPRFKSRDTLEKLTSQGPVALLSVDLGQNEPVAARVCSLK |
| | | NINDKITLDNSCRISFLDDYKKQIKDYRDSLDELEIKIRLEAINS |
| | | LETNQQVEIRDLDVFSADRAKANTVDMFDIDPNLISWDSMSD |
| | | ARVSTQISDLYLKNGGDESRVYFEINNKRIKRSDYNISQLVRP |
| | | KLSDSTRKNLNDSIWKLKRTSEEYLKLSKRKLELSRAVVNYTI |
| | | RQSKLLSGINDIVIILEDLDVKKKFNGRGIRDIGWDNFFSSRKE |
| | | NRWFIPAFHKTFSELSSNRGLCVIEVNPAWTSATCPDCGFCSK |
| | | ENRDGINFTCRKCGVSYHADIDVATLNIARVAVLGKPMSGPA |
| | | DRERLGDTKKPRVARSRKTMKRKDISNSTVEAMVTA |
| CasΦ.19 | SEQ ID | MLVRTSTLVQDNKNSRSASRAFLKKPKMPKNKHIKEPTELAK |
| | NO: 157 | LIRELFPGQRFTRAINTQAGKILKHKGRDEVVEFLKNKGIDKE |
| | | QFMDFRPPTKARIVATSGAIEEFSYLRVSMAIQECCFGKYKFP |
| | | KEKVNGKLVLETVGLTKEELDDFLPKKYYENKKSRDRFFLKT |
| | | GICDYGYTYAQGLNEIFRNTRAIYEGVFTKVNNRNEKRREKK |
| | | DKYNEERRSKGLSEEPYDEDESATDESGHLINPPGVNLNIWTC |
| | | EGFCKGPYVTKLSGTPGYEVILPKVFDGYNRDPNEIISCGITDR |
| | | FAIPEGEPGHIPWHQRLEIPEGQPGYVPGHQRFADTGQNNSGK |
| | | ANPNKKGRMRKYYGHGTKYTQPGEYQEVFRKGHREGNKRR |
| | | YWEEDFRSEAHDCILYVIHIGDDWVVCDLRGPLRDAYRRGLV |
| | | PKEGITTQELCNLFSGDPVIDPKHGVVTFCYKNGLVRAQKTIS |
| | | AGKKSRELLGALTSQGPIALIGVDLGQTEPVGARAFIVNQARG |
| | | SLSLPTLKGSFLLTAENSSSWNVFKGEIKAYREAIDDLAIRLKK |
| | | EAVATLSVEQQTEIESYEAFSAEDAKQLACEKFGVDSSFILWE |
| | | DMTPYHTGPATYYFAKQFLKKNGGNKSLIEYIPYQKKKSKKT |
| | | PKAVLRSDYNIACCVRPKLLPETRKALNEAIRIVQKNSDEYQR |
| | | LSKRKLEFCRRVVNYLVRKAKKLTGLERVIIAIEDLKSLEKFF |
| | | TGSGKRDNGWSNFFRPKKENRWFIPAFHKAFSELAPNRGFYV |
| | | IECNPARTSITDPDCGYCDGDNRDGIKFECKKCGAKHHTDLD |
| | | VAPLNIAIVAVTGRPMPKTVSNKSKRERSGGEKSVGASRKRN |
| | | HRKSKANQEMLDATSSAAE |
| CasΦ.20 | SEQ ID | MPKIKKPTEISLLRKEVFPDLHFAKDRMRAASLVLKNEGREA |
| | NO: 158 | AIEYLRVNHEDKPPNFMPPAKTPYVALSRPLEQWPIAQASIAI |
| | | QKYIFGLTKDEFSATKKLLYGDKSTPNTESRKRWFEVTGVPN |
| | | FGYMSAQGLNAIFSGALARYEGVVQKVENRNKKRFEKLSEK |
| | | NQLLIEEGQPVKDYVPDTAYHTPETLQKLAENNHVRVEDLGD |
| | | MIDRLVHPPGIHRSIYGYQQVPPFAYDPDNPKGIILPKAYAGY |
| | | TRKPHDIIEAMPNRLNIPEGQAGYIPEHQRDKLKKGGRVKRLR |
| | | TTRVRVDATETVRAKAEALNAEKARLRGKEAILAVFQIEEDW |
| | | ALIDMRGLLRNVYMRKLIAAGELTPTTLLGYFTETLTLDPRRT |
| | | EATFCYHLRSEGALHAEYVRHGKNTRELLLDLTKDNEKIALV |
| | | TIDLGQRNPLAAAIFRVGRDASGDLTENSLEPVSRMLLPQAYL |
| | | DQIKAYRDAYDSFRQNIWDTALASLTPEQQRQILAYEAYTPD |
| | | DSKENVLRLLLGGNVMPDDLPWEDMTKNTHYISDRYLADGG |
| | | DPSKVWFVPGPRKRKKNAPPLKKPPKPRELVKRSDHNISHLSE |
| | | FRPQLLKETRDAFEKAKIDTERGHVGYQKLSTRKDQLCKEIL |
| | | NWLEAEAVRLTRCKTMVLGLEDLNGPFFNQGKGKVRGWVS |
| | | FFRQKQENRWIVNGFRKNALARAHDKGKYILELWPSWTSQT |
| | | CPKCKHVHADNRHGDDFVCLQCGARLHADAEVATWNLAVV |
| | | AIQGHSLPGPVREKSNDRKKSGSARKSKKANESGKVVGAWA |
| | | AQATPKRATSKKETGTARNPVYNPLETQASCPAP |
| CasΦ.21 | SEQ ID | MTPSPQIARLVETPLAAALKAHHPGKKFRSDYLKKAGKILKD |
| | NO: 159 | QGVEAAMAHLDGKDQAEPPNFKPPAKCRIVARSREFSEWPIV |
| | | KASVEIQKYIYGLTLEERKACDPGKSSASHKAWFAKTGVNTF |
| | | GYSSVQGFNLIFGHTLGRYDGVLVKTENLNKKRAEKNERFRA |
| | | KALAEGRAEPVCPPLVTATNDTGQDVTLEDGRVVRPGQLLQP |
| | | PGINPNIYAYQQVSPKAYVPGIIELPEEFQGYSRDPNAVILPLV |
| | | PRDRLSIPKGQPGYVPEPHREGLTGRKDRRMRRYYETERGTK |
| | | LKRPPLTAKGRADKANEALLVVVRIDSDWVVMDVRGLLRNA |
| | | RWRRLVSKEGITLNGLLDLFTGDPVLNPKDCSVSRDTGDPVN |
| | | DPRHGVVTFCYKLGVVDVCSKDRPIKGFRTKEVLERLTSSGT |
| | | VGMVSIDLGQTNPVAAAVSRVTKGLQAETLETFTLPDDLLGK |
| | | VRAYRAKTDRMEEGFRRNALRKLTAEQQAEITRYNDATEQQ |
| | | AKALVCSTYGIGPEEVPWERMTSNTTYISDHILDHGGDPDTVF |
| | | FMATKRGQNKPTLHKRKDKAWGQKFRPAISVETRLARQAAE |
| | | WELRRASLEFQKLSVWKTELCRQAVNYVMERTKKRTQCDVI |
| | | IPVIEDLPVPLFHGSGKRDPGWANFFVHKRENRWFIDGLHKAF |
| | | SELGKHRGIYVFEVCPQRTSITCPKCGHCDPDNRDGEKFVCLS |
| | | CQATLNADLDVATTNLVRVALTGKVMPRSERSGDAQTPGPA |
| | | RKARTGKIKGSKPTSAPQGATQTDAKAHLSQTGV |
| CasΦ.22 | SEQ ID | MTPSPQIARLVETPLAAALKAHHPGKKFRSDYLKKAGKILKD |
| | NO: 160 | QGVEAAMAHLDGKDQAEPPNFKPPAKCRIVARSREFSEWPIV |
| | | KASVEIQKYIYGLTLEERKACDPGKSSASHKAWFAKTGVNTF |
| | | GYSSVQGFNLIFGHTLGRYDGVLVKTENLNKKRAEKNERFRA |
| | | KALAEGRAEPVCPPLVTATNDTGQDVTLEDGRVVRPGQLLQP |
| | | PGINPNIYAYQQVSPKAYVPGIIELPEEFQGYSRDPNAVILPLV |
| | | PRDRLSIPKGQPGYVPEPHREGLTGRKDRRMRRYYETERGTK |
| | | LKRPPLTAKGRADKANEALLVVVRIDSDWVVMDVRGLLRNA |
| | | RWRRLVSKEGITLNGLLDLFTGDPVLNPKDCSVSRDTGDPVN |
| | | DPRHGVVTFCYKLGVVDVCSKDRPIKGFRTKEVLERLTSSGT |
| | | VGMVSIDLGQTNPVAAAVSRVTKGLQAETLETFTLPDDLLGK |
| | | VRAYRAKTDRMEEGFRRNALRKLTAEQQAEITRYNDATEQQ |
| | | AKALVCSTYGIGPEEVPWERMTSNTTYISDHILDHGGDPDTVF |
| | | FMATKRGQNKPTLHKRKDKAWGQKFRPAISVETRLARQAAE |
| | | WELRRASLEFQKLSVWKTELCRQAVNYVMERTKKRTQCDVI |
| | | IPVIEDLPVPLFHGSGKRDPGWANFFVHKRENRWFIDGLHKAF |
| | | SELGKHRGIYVFEVCPQRTSITCPKCGHCDPDNRDGEKFVCLS |
| | | CQATLHADLDVATTNLVRVALTGKVMPRSERSGDAQTPGPA |
| | | RKARTGKIKGSKPTSAPQGATQTDAKAHLSQTGV |
| CasΦ.23 | SEQ ID | MKTEKPKTALTLLREEVFPGKKYRLDVLKEAGKKLSTKGRE |
| | NO: 161 | ATIEFLTGKDEERPQNFQPPAKTSIVAQSRPFDQWPIVQVSLA |
| | | VQKYIYGLTQSEFEANKKALYGETGKAISTESRRAWFEATGV |
| | | DNFGFTAAQGINPIFSQAVARYEGVIKKVENRNEKKLKKLTK |
| | | KNLLRLESGEEIEDFEPEATFNEEGRLLQPPGANPNIYCYQQIS |
| | | PRIYDPSDPKGVILPQIYAGYDRKPEDIISAGVPNRLAIPEGQPG |
| | | YIPEHQRAGLKTQGRIRCRASVEAKARAAILAVVHLGEDWVV |
| | | LDLRGLLRNVYWRKLASPGTLTLKGLLDFFTGGPVLDARRGI |
| | | ATFSYTLKSAAAVHAENTYKGKGTREVLLKLTENNSVALVT |
| | | VDLGQRNPLAAMIARVSRTSQGDLTYPESVEPLTRLFLPDPFL |
| | | EEVRKYRSSYDALRLSIREAAIASLTPEQQAEIRYIEKFSAGDA |
| | | KKNVAEVFGIDPTQLPWDAMTPRTTYISDLFLRMGGDRSRVF |
| | | FEVPPKKAKKAPKKPPKKPAGPRIVKRTDGMIARLREIRPRLS |
| | | AETNKAFQEARWEGERSNVAFQKLSVRRKQFARTVVNHLVQ |
| | | TAQKMSRCDTVVLGIEDLNVPFFHGRGKYQPGWEGFFRQKK |
| | | ENRWLINDMHKALSERGPHRGGYVLELTPFWTSLRCPKCGH |
| | | TDSANRDGDDFVCVKCGAKLHSDLEVATANLALVAITGQSIP |
| | | RPPREQSSGKKSTGTARMKKTSGETQGKGSKACVSEALNKIE |
| | | QGTARDPVYNPLNSQVSCPAP |
| CasΦ.24 | SEQ ID | VYNPDMKKPNNIRRIREEHFEGLCFGKDVLTKAGKIYEKDGE |
| | NO: 162 | EAAIDFLMGKDEEDPPNFKPPAKTTIVAQSRPFDQWPIYQVSQ |
| | | AVQERVFAYTEEEFNASKEALFSGDISSKSRDFWFKTNNISDQ |
| | | GIGAQGLNTILSHAFSRYSGVIKKVENRNKKRLKKLSKKNQL |
| | | KIEEGLEILEFKPDSAFNENGLLAQPPGINPNIYGYQAVTPFVF |
| | | DPDNPGDVILPKQYEGYSRKPDDIIEKGPSRLDIPKGQPGYVPE |
| | | HQRKNLKKKGRVRLYRRTPPKTKALASILAVLQIGKDWVLFD |
| | | MRGLLRSVYMREAATPGQISAKDLLDTFTGCPVLNTRTGEFT |
| | | FCYKLRSEGALHARKIYTKGETRTLLTSLTSENNTIALVTVDL |
| | | GQRNPAAIMISRLSRKEELSEKDIQPVSRRLLPDRYLNELKRY |
| | | RDAYDAFRQEVRDEAFTSLCPEHQEQVQQYEALTPEKAKNL |
| | | VLKHFFGTHDPDLPWDDMTSNTHYIANLYLERGGDPSKVFFT |
| | | RPLKKDSKSKKPRKPTKRTDASISRLPEIRPKMPEDARKAFEK |
| | | AKWEIYTGHEKFPKLAKRVNQLCREIANWIEKEAKRLTLCDT |
| | | VVVGIEDLSLPPKRGKGKFQETWQGFFRQKFENRWVIDTLKK |
| | | AIQNRAHDKGKYVLGLAPYWTSQRCPACGFIHKSNRNGDHF |
| | | KCLKCEALFHADSEVATWNLALVAVLGKGITNPDSKKPSGQ |
| | | KKTGTTRKKQIKGKNKGKETVNVPPTTQEVEDIIAFFEKDDET |
| | | VRNPVYKPTGT |
| CasΦ.25 | SEQ ID | MKKPNNIRRIREEHFEGLCFGKDVLTKAGKIYEKDGEEAAIDF |
| | NO: 163 | LMGKDEEDPPNFKPPAKTTIVAQSRPFDQWPIYQVSQAVQER |
| | | VFAYTEEEFNASKEALFSGDISSKSRDFWFKTNNISDQGIGAQ |
| | | GLNTILSHAFSRYSGVIKKVENRNKKRLKKLSKKNQLKIEEGL |
| | | EILEFKPDSAFNENGLLAQPPGINPNIYGYQAVTPFVFDPDNPG |
| | | DVILPKQYEGYSRKPDDIIEKGPSRLDIPKGQPGYVPEHQRKN |
| | | LKKKGRVRLYRRTPPKTKALASILAVLQIGKDWVLFDMRGLL |
| | | RSVYMREAATPGQISAKDLLDTFTGCPVLNTRTGEFTFCYKL |
| | | RSEGALHARKIYTKGETRTLLTSLTSENNTIALVTVDLGQRNP |
| | | AAIMISRLSRKEELSEKDIQPVSRRLLPDRYLNELKRYRDAYD |
| | | AFRQEVRDEAFTSLCPEHQEQVQQYEALTPEKAKNLVLKHFF |
| | | GTHDPDLPWDDMTSNTHYIANLYLERGGDPSKVFFTRPLKKD |
| | | SKSKKPRKPTKRTDASISRLPEIRPKMPEDARKAFEKAKWEIY |
| | | TGHEKFPKLAKRVNQLCREIANWIEKEAKRLTLCDTVVVGIE |
| | | DLSLPPKRGKGKFQETWQGFFRQKFENRWVIDTLKKAIQNRA |
| | | HDKGKYVLGLAPYWTSQRCPACGFIHKSNRNGDHFKCLKCE |
| | | ALFHADSEVATWNLALVAVLGKGITNPDSKKPSGQKKTGTT |
| | | RKKQIKGKNKGKETVNVPPTTQEVEDIIAFFEKDDETVRNPVY |
| | | KPTGT |
| CasΦ.26 | SEQ ID | VIKTHFPAGRFRKDHQKTAGKKLKHEGEEACVEYLRNKVSD |
| | NO: 164 | YPPNFKPPAKGTIVAQSRPFSEWPIVRASEAIQKYVYGLTVAE |
| | | LDVFSPGTSKPSHAEWFAKTGVENYGYRQVQGLNTIFQNTVN |
| | | RFKGVLKKVENRNKKSLKRQEGANRRRVEEGLPEVPVTVES |
| | | ATDDEGRLLQPPGVNPSIYGYQGVAPRVCTDLQGFSGMSVDF |
| | | AGYRRDPDAVLVESLPEGRLSIPKGERGYVPEWQRDPERNKF |
| | | PLREGSRRQRKWYSNACHKPKPGRTSKYDPEALKKASAKDA |
| | | LLVSISIGEDWAIIDVRGLLRDARRRGFTPEEGLSLNSLLGLFT |
| | | EYPVFDVQRGLITFTYKLGQVDVHSRKTVPTFRSRALLESLVA |
| | | KEEIALVSVDLGQTNPASMKVSRVRAQEGALVAEPVHRMFLS |
| | | DVLLGELSSYRKRMDAFEDAIRAQAFETMTPEQQAEITRVCD |
| | | VSVEVARRRVCEKYSISPQDVPWGEMTGHSTFIVDAVLRKGG |
| | | DESLVYFKNKEGETLKFRDLRISRMEGVRPRLTKDTRDALNK |
| | | AVLDLKRAHPTFAKLAKQKLELARRCVNFIEREAKRYTQCER |
| | | VVFVIEDLNVGFFHGKGKRDRGWDAFFTAKKENRWVIQALH |
| | | KAFSDLGLHRGSYVIEVTPQRTSMTCPRCGHCDKGNRNGEKF |
| | | VCLQCGATLHADLEVATDNIERVALTGKAMPKPPVRERSGD |
| | | VQKAGTARKARKPLKPKQKTEPSVQEGSSDDGVDKSPGDAS |
| | | RNPVYNPSDTLSI |
| CasΦ.27 | SEQ ID | MAKAKTLAALLRELLPGQHLAPHHRWVANKLLMTSGDAAA |
| | NO: 165 | FVIGKSVSDPVRGSFRKDVITKAGRIFKKDGPDAAAAFLDGK |
| | | WEDRPPNFQPPAKAAIVAISRSFDEWPIVKVSCAIQQYLYALP |
| | | VQEFESSVPEARAQAHAAWFQDTGVDDCNFKSTQGLNAIFN |
| | | HGKRTYEGVLKKAQNRNDKKNLRLERINAKRAEAGQAPLVA |
| | | GPDESPTDDAGCLLHPPGINANIYCYQQVSPRPYEQSCGIQLPP |
| | | EYAGYNRLSNVAIPPMPNRLDIPQGQPGYVPEHHRHGIKKFG |
| | | RVRKRYGVVPGRNRDADGKRTRQVLTEAGAAAKARDSVLA |
| | | VIRIGDDWTVVDLRGLLRNAQWRKLVPDGGITVQGLLDLFTG |
| | | DPVIDPRRGVVTFIYKADSVGIHSEKVCRGKQSKNLLERLCA |
| | | MPEKSSTRLDCARQAVALVSVDLGQRNPVAARFSRVSLAEG |
| | | QLQAQLVSAQFLDDAMVAMIRSYREEYDRFESLVREQAKAA |
| | | LSPEQLSEIVRHEADSAESVKSCVCAKFGIDPAGLSWDKMTSG |
| | | TWRIADHVQAAGGDVEWFFFKTCGKGKEIKTVRRSDFNVAK |
| | | QFRLRLSPETRKDWNDAIWELKRGNPAYVSFSKRKSEFARRV |
| | | VNDLVHRARRAVRCDEVVFAIEDLNISFFHGKGQRQMGWDA |
| | | FFEVKQENRWFIQALHKAFVERATHKGGYVLEVAPARTSTTC |
| | | PECRHCDPESRRGEQFCCIKCRHTCHADLEVATFNIEQVALTG |
| | | VSLPKRLSSTLL |
| CasΦ.28 | SEQ ID | MSKEKTPPSAYAILKAKHFPDLDFEKKHKMMAGRMFKNGAS |
| | NO: 166 | EQEVVQYLQGKGSESLMDVKPPAKSPILAQSRPFDEWEMVRT |
| | | SRLIQETIFGIPKRGSIPKRDGLSETQFNELVASLEVGGKPMLN |
| | | KQTRAIFYGLLGIKPPTFHAMAQNILIDLAINIRKGVLKKVDNL |
| | | NEKNRKKVKRIRDAGEQDVMVPAEVTAHDDRGYLNHPPGV |
| | | NPTIPGYQGVVIPFPEGFEGLPSGMTPVDWSHVLVDYLPHDRL |
| | | SIPKGSPGYIPEWQRPLLNRHKGRRHRSWYANSLNKPRKSRT |
| | | EEAKDRQNAGKRTALIEAERLKGVLPVLMRFKEDWLIIDARG |
| | | LLRNARYRGVLPEGSTLGNLIDLFSDSPRVDTRRGICTFLYRK |
| | | GRAYSTKPVKRKESKETLLKLTEKSTIALVSIDLGQTNPLTAK |
| | | LSKVRQVDGCLVAEPVLRKLIDNASEDGKEIARYRVAHDLLR |
| | | ARILEDAIDLLGIYKDEVVRARSDTPDLCKERVCRFLGLDSQA |
| | | IDWDRMTPYTDFIAQAFVAKGGDPKVVTIKPNGKPKMFRKD |
| | | RSIKNMKGIRLDISKEASSAYREAQWAIQRESPDFQRLAVWQS |
| | | QLTKRIVNQLVAWAKKCTQCDTVVLAFEDLNIGMMHGSGK |
| | | WANGGWNALFLHKQENRWFMQAFHKALTELSAHKGIPTIEV |
| | | LPHRTSITCTQCGHCHPGNRDGERFKCLKCEFLANTDLEIATD |
| | | NIERVALTGLPMPKGERSSAKRKPGGTRKTKKSKHSGNSPLA |
| | | AE |
| CasΦ.29 | SEQ ID | MEKAGPTSPLSVLIHKNFEGCRFQIDHLKIAGRKLAREGEAAA |
| | NO: 167 | IEYLLDKKCEGLPPNFQPPAKGNVIAQSRPFTEWAPYRASVAI |
| | | QKYIYSLSVDERKVCDPGSSSDSHEKWFKQTGVQNYGYTHV |
| | | QGLNLIFKHALARYDGVLKKVDNRNEKNRKKAERVNSFRRE |
| | | EGLPEEVFEEEKATDETGHLLQPPGVNHSIYCYQSVRPKPFNP |
| | | RKPGGISLPEAYSGYSLKPQDELPIGSLDRLSIPPGQPGYVPEW |
| | | QRSQLTTQKHRRKRSWYSAQKWKPRTGRTSTFDPDRLNCAR |
| | | AQGAILAVVRIHEDWVVFDVRGLLRNALWRELAGKGLTVRD |
| | | LLDFFTGDPVVDTKRGVVTFTYKLGKVDVHSLRTVRGKRSK |
| | | KVLEDLTLSSDVGLVTIDLGQTNVLAADYSKVTRSENGELLA |
| | | VPLSKSFLPKHLLHEVTAYRTSYDQMEEGFRRKALLTLTEDQ |
| | | QVEVTLVRDFSVESSKTKLLQLGVDVTSLPWEKMSSNTTYIS |
| | | DQLLQQGADPASLFFDGERDGKPCRHKKKDRTWAYLVRPKV |
| | | SPETRKALNEALWALKNTSPEFESLSKRKIQFSRRCMNYLLNE |
| | | AKRISGCGQVVFVIEDLNVRVHHGRGKRAIGWDNFFKPKREN |
| | | RWFMQALHKAASELAIHRGMHIIEACPARSSITCPKCGHCDPE |
| | | NRCSSDREKFLCVKCGAAFHADLEVATFNLRKVALTGTALPK |
| | | SIDHSRDGLIPKGARNRKLKEPQANDEKACA |
| CasΦ.30 | SEQ ID | MKEQSPLSSVLKSNFPGKKFLSADIRVAGRKLAQLGEAAAVE |
| | NO: 168 | YLSPRQRDSVPNFRPPAFCTVVAKSRPFEEWPIYKASVLLQEQ |
| | | IYGMTGQEFEERCGSIPTSLSGLRQWASSVGLGAAMEGLHVQ |
| | | GMNLMVKNAINRYKGVLVKVENRNKKLVEANEAKNSSREE |
| | | RGLPPLRPPELGSAFGPDGRLVNPPGIDKSIRLYQGVSPVPVVK |
| | | TTGRPTVHRLDIPAGEKGHVPLWQREAGLVKEGPRRRRMWY |
| | | SNSNLKRSRKDRSAEASEARKADSVVVRVSVKEDWVDIDVR |
| | | GLLRNVAWRGIERAGESTEDLLSLFSGDPVVDPSRDSVVFLY |
| | | KEGVVDVLSKKVVGAGKSRKQLEKMVSEGPVALVSCDLGQT |
| | | NYVAARVSVLDESLSPVRSFRVDPREFPSADGSQGVVGSLDRI |
| | | RADSDRLEAKLLSEAEASLPEPVRAEIEFLRSERPSAVAGRLCL |
| | | KLGIDPRSIPWEKMGSTTSFISEALSAKGSPLALHDGAPIKDSR |
| | | FAHAARGRLSPESRKALNEALWERKSSSREYGVISRRKSEASR |
| | | RMANAVLSESRRLTGLAVVAVNLEDLNMVSKFFHGRGKRAP |
| | | GWAGFFTPKMENRWFIRSIHKAMCDLSKHRGITVIESRPERTS |
| | | ISCPECGHCDPENRSGERFSCKSCGVSLHADFEVATRNLERVA |
| | | LTGKPMPRRENLHSPEGATASRKTRKKPREATASTFLDLRSVL |
| | | SSAENEGSGPAARAG |
| CasΦ.31 | SEQ ID | MLPPSNKIGKSMSLKEFINKRNFKSSIIKQAGKILKKEGEEAVK |
| | NO: 169 | KYLDDNYVEGYKKRDFPITAKCNIVASNRKIEDFDISKFSSFIQ |
| | | NYVFNLNKDNFEEFSKIKYNRKSFDELYKKIANEIGLEKPNYE |
| | | NIQGEIAVIRNAINIYNGVLKKVENRNKKIQEKNQSKDPPKLL |
| | | SAFDDNGFLAERPGINETIYGYQSVRLRHLDVEKDKDIIVQLP |
| | | DIYQKYNKKSTDKISVKKRLNKYNVDEYGKLISKRRKERINK |
| | | DDAILCVSNFGDDWIIFDARGLLRQTYRYKLKKKGLCIKDLL |
| | | NLFTGDPIINPTKTDLKEALSLSFKDGIINNRTLKVKNYKKCPE |
| | | LISELIRDKGKVAMISIDLGQTNPISYRLSKFTANNVAYIENGVI |
| | | SEDDIVKMKKWREKSDKLENLIKEEAIASLSDDEQREVRLYE |
| | | NDIADNTKKKILEKFNIREEDLDFSKMSNNTYFIRDCLKNKNI |
| | | DESEFTFEKNGKKLDPTDACFAREYKNKLSELTRKKINEKIWE |
| | | IKKNSKEYHKISIYKKETIRYIVNKLIKQSKEKSECDDIIVNIEK |
| | | LQIGGNFFGGRGKRDPGWNNFFLPKEENRWFINACHKAFSEL |
| | | APHKGIIVIESDPAYTSQTCPKCENCDKENRNGEKFKCKKCNY |
| | | EANADIDVATENLEKIAKNGRRLIKNFDQLGERLPGAEMPGG |
| | | ARKRKPSKSLPKNGRGAGVGSEPELINQSPSQVIA |
| CasΦ.32 | SEQ ID | VPDKKETPLVALCKKSFPGLRFKKHDSRQAGRILKSKGEGAA |
| | NO: 170 | VAFLEGKGGTTQPNFKPPVKCNIVAMSRPLEEWPIYKASVVIQ |
| | | KYVYAQSYEEFKATDPGKSEAGLRAWLKATRVDTDGYFNV |
| | | QGLNLIFQNARATYEGVLKKVENRNSKKVAKIEQRNEHRAER |
| | | GLPLLTLDEPETALDETGHLRHRPGINCSVFGYQHMKLKPYV |
| | | PGSIPGVTGYSRDPSTPIAACGVDRLEIPEGQPGYVPPWDREN |
| | | LSVKKHRRKRASWARSRGGAIDDNMLLAVVRVADDWALLD |
| | | LRGLLRNTQYRKLLDRSVPVTIESLLNLVTNDPTLSVVKKPGK |
| | | PVRYTATLIYKQGVVPVVKAKVVKGSYVSKMLDDTTETFSL |
| | | VGVDLGVNNLIAANALRIRPGKCVERLQAFTLPEQTVEDFFRF |
| | | RKAYDKHQENLRLAAVRSLTAEQQAEVLALDTFGPEQAKMQ |
| | | VCGHLGLSVDEVPWDKVNSRSSILSDLAKERGVDDTLYMFPF |
| | | FKGKGKKRKTEIRKRWDVNWAQHFRPQLTSETRKALNEAK |
| | | WEAERNSSKYHQLSIRKKELSRHCVNYVIRTAEKRAQCGKVI |
| | | VAVEDLHHSFRRGGKGSRKSGWGGFFAAKQEGRWLMDALF |
| | | GAFCDLAVHRGYRVIKVDPYNTSRTCPECGHCDKANRDRVN |
| | | REAFICVCCGYRGNADIDVAAYNIAMVAITGVSLRKAARASV |
| | | ASTPLESLAAE |
| CasΦ.33 | SEQ ID | MSKTKELNDYQEALARRLPGVRHQKSVRRAARLVYDRQGE |
| | NO: 171 | DAMVAFLDGKEVDEPYTLQPPAKCHILAVSRPIEEWPIARVT |
| | | MAVQEHVYALPVHEVEKSRPETTEGSRSAWFKNSGVSNHGV |
| | | THAQTLNAILKNAYNVYNGVIKKVENRNAKKRDSLAAKNKS |
| | | RERKGLPHFKADPPELATDEQGYLLQPPSPNSSVYLVQQHLR |
| | | TPQIDLPSGYTGPVVDPRSPIPSLIPIDRLAIPPGQPGYVPLHDR |
| | | EKLTSNKHRRMKLPKSLRAQGALPVCFRVFDDWAVVDGRGL |
| | | LRHAQYRRLAPKNVSIAELLELYTGDPVIDIKRNLMTFRFAEA |
| | | VVEVTARKIVEKYHNKYLLKLTEPKGKPVREIGLVSIDLNVQ |
| | | RLIALAIYRVHQTGESQLALSPCLHREILPAKGLGDFDKYKSK |
| | | FNQLTEEILTAAVQTLTSAQQEEYQRYVEESSHEAKADLCLK |
| | | YSITPHELAWDKMTSSTQYISRWLRDHGWNASDFTQITKGRK |
| | | KVERLWSDSRWAQELKPKLSNETRRKLEDAKHDLQRANPEW |
| | | QRLAKRKQEYSRHLANTVLSMAREYTACETVVIAIENLPMKG |
| | | GFVDGNGSRESGWDNFFTHKKENRWMIKDIHKALSDLAPNR |
| | | GVHVLEVNPQYTSQTCPECGHRDKANRDPIQRERFCCTHCGA |
| | | QRHADLEVATHNIAMVATTGKSLTGKSLAPQRLQEAAE |
| CasΦ.41 | SEQ ID | VLLSDRIQYTDPSAPIPAMTVVDRRKIKKGEPGYVPPFMRKNL |
| | NO: 172 | STNKHRRMRLSRGQKEACALPVGLRLPDGKDGWDFIIFDGRA |
| | | LLRACRRLRLEVTSMDDVLDKFTGDPRIQLSPAGETIVTCMLK |
| | | PQHTGVIQQKLITGKMKDRLVQLTAEAPIAMLTVDLGEHNLV |
| | | ACGAYTVGQRRGKLQSERLEAFLLPEKVLADFEGYRRDSDEH |
| | | SETLRHEALKALSKRQQREVLDMLRTGADQARESLCYKYGL |
| | | DLQALPWDKMSSNSTFIAQHLMSLGFGESATHVRYRPKRKAS |
| | | ERTILKYDSRFAAEEKIKLTDETRRAWNEAIWECQRASQEFRC |
| | | LSVRKLQLARAAVNWTLTQAKQRSRCPRVVVVVEDLNVRF |
| | | MHGGGKRQEGWAGFFKARSEKRWFIQALHKAYTELPTNRGI |
| | | HVMEVNPARTSITCTKCGYCDPENRYGEDFHCRNPKCKVRG |
| | | GHVANADLDIATENLARVALSGPMPKAPKLK |
| CasΦ.34 | SEQ ID | MTPSFGYQMIIVTPIHHASGAWATLRLLFLNPKTSGVMLGMT |
| | NO: 173 | KTKSAFALMREEVFPGLLFKSADLKMAGRKFAKEGREAAIEY |
| | | LRGKDEERPANFKPPAKGDIIAQSRPFDQWPIVQVSQAIQKYIF |
| | | GLTKAEFDATKTLLYGEGNHPTTESRRRWFEATGVPDFGFTS |
| | | AQGLNAIFSSALARYEGVIQKVENRNEKRLKKLSEKNQRLVE |
| | | EGHAVEAYVPETAFHTLESLKALSEKSLVPLDDLMDKIDRLA |
| | | QPPGINPCLYGYQQVAPYIYDPENPRGVVLPDLYLGYCRKPD |
| | | DPITACPNRLDIPKGQPGYIPEHQRGQLKKHGRVRRFRYTNPQ |
| | | AKARAKAQTAILAVLRIDEDWVVMDLRGLLRNVYFREVAAP |
| | | GELTARTLLDTFTGCPVLNLRSNVVTFCYDIESKGALHAEYV |
| | | RKGWATRNKLLDLTKDGQSVALLSVDLGQRHPVAVMISRLK |
| | | RDDKGDLSEKSIQVVSRTFADQYVDKLKRYRVQYDALRKEIY |
| | | DAALVSLPPEQQAEIRAYEAFAPGDAKANVLSVMFQGEVSPD |
| | | ELPWDKMNTNTHYISDLYLRRGGDPSRVFFVPQPSTPKKNAK |
| | | KPPAPRKPVKRTDENVSHMPEFRPHLSNETREAFQKAKWTM |
| | | ERGNVRYAQLSRFLNQIVREANNWLVSEAKKLTQCQTVVWA |
| | | IEDLHVPFFHGKGKYHETWDGFFRQKKEDRWFVNVFHKAISE |
| | | RAPNKGEYVMEVAPYRTSQRCPVCGFVDADNRHGDHFKCLR |
| | | CGVELHADLEVATWNIALVAVQGHGIAGPPREQSCGGETAG |
| | | TARKGKNIKKNKGLADAVTVEAQDSEGGSKKDAGTARNPVY |
| | | IPSESQVNCPAP |
| CasΦ.35 | SEQ ID | MKPKTPKPPKTPVAALIDKHFPGKRFRASYLKSVGKKLKNQG |
| | NO: 174 | EDVAVRFLTGKDEERPPNFQPPAKSNIVAQSRPIEEWPIHKVS |
| | | VAVQEYVYGLTVAEKEACSDAGESSSSHAAWFAKTGVENFG |
| | | YTSVQGLNKIFPPTFNRFDGVIKKVENRNEKKRQKATRINEAK |
| | | RNKGQSEDPPEAEVKATDDAGYLLQPPGINHSVYGYQSITLCP |
| | | YTAEKFPTIKLPEEYAGYHSNPDAPIPAGVPDRLAIPEGQPGH |
| | | VPEEHRAGLSTKKHRRVRQWYAMANWKPKPKRTSKPDYDR |
| | | LAKARAQGALLIVIRIDEDWVVVDARGLLRNVRWRSLGKREI |
| | | TPNELLDLFTGDPVLDLKRGVVTFTYAEGVVNVCSRSTTKGK |
| | | QTKVLLDAMTAPRDGKKRQIGMVAVDLGQTNPIAAEYSRVG |
| | | KNAAGTLEATPLSRSTLPDELLREIALYRKAHDRLEAQLREEA |
| | | VLKLTAEQQAENARYVETSEEGAKLALANLGVDTSTLPWDA |
| | | MTGWSTCISDHLINHGGDTSAVFFQTIRKGTKKLETIKRKDSS |
| | | WADIVRPRLTKETREALNDFLWELKRSHEGYEKLSKRLEELA |
| | | RRAVNHVVQEVKWLTQCQDIVIVIEDLNVRNFHGGGKRGGG |
| | | WSNFFTVKKENRWFMQALHKAFSDLAAHRGIPVLEVYPART |
| | | SITCLGCGHCDPENRDGEAFVCQQCGATFHADLEVATRNIAR |
| | | VALTGEAMPKAPAREQPGGAKKRGTSRRRKLTEVAVKSAEP |
| | | TIHQAKNQQLNGTSRDPVYKGSELPAL |
| CasΦ.43 | SEQ ID | MSEITDLLKANFKGKTFKSADMRMAGRILKKSGAQAVIKYLS |
| | NO: 175 | DKGAVDPPDFRPPAKCNIIAQSRPFDEWPICKASMAIQQHIYG |
| | | LTKNEFDESSPGTSSASHEQWFAKTGVDTHGFTHVQGLNLIF |
| | | QHAKKRYEGVIKKVENYNEKERKKFEGINERRSKEGMPLLEP |
| | | RLRTAFGDDGKFAEKPGVNPSIYLYQQTSPRPYDKTKHPYVH |
| | | APFELKEITTIPTQDDRLKIPFGAPGHVPEKHRSQLSMAKHKR |
| | | RRAWYALSQNKPRPPKDGSKGRRSVRDLADLKAASLADAIPL |
| | | VSRVGFDWVVIDGRGLLRNLRWRKLAHEGMTVEEMLGFFSG |
| | | DPVIDPRRNVATFIYKAEHATVKSRKPIGGAKRAREELLKATA |
| | | SSDGVIRQVGLISVDLGQTNPVAYEISRMHQANGELVAEHLE |
| | | YGLLNDEQVNSIQRYRAAWDSMNESFRQKAIESLSMEAQDEI |
| | | MQASTGAAKRTREAVLTMFGPNATLPWSRMSSNTTCISDALI |
| | | EVGKEEETNFVTSNGPRKRTDAQWAAYLRPRVNPETRALLN |
| | | QAVWDLMKRSDEYERLSKRKLEMARQCVNFVVARAEKLTQ |
| | | CNNIGIVLENLVVRNFHGSGRRESGWEGFFEPKRENRWFMQV |
| | | LHKAFSDLAQHRGVMVFEVHPAYSSQTCPACRYVDPKNRSS |
| | | EDRERFKCLKCGRSFNADREVATFNIREIARTGVGLPKPDCER |
| | | SRGVQTTGTARNPGRSLKSNKNPSEPKRVLQSKTRKKITSTET |
| | | QNEPLATDLKT |
| CasΦ.44 | SEQ ID | MTPKTESPLSALCKKHFPGKRFRTNYLKDAGKILKKHGEDAV |
| | NO: 176 | VAFLSDKQEDEPANFCPPAKVHILAQSRPFEDWPINLASKAIQ |
| | | TYVYGLTADERKTCEPGTSKESHDRWFKETGVDHHGFTSVQ |
| | | GLNLIFKHTLNRYDGVIKKVETRNEKRRSSVVRINEKKAAEG |
| | | LPLIAAEAEETAFGEDGRLLQPPGVNHSIYCFQQVSPQPYSSK |
| | | KHPQVVLPHAVQGVDPDAPIPVGRPNRLDIPKGQPGYVPEWQ |
| | | RPHLSMKCT<RVRMWYARANWRRKPGRRSVLNEARLKEASA |
| | | KGALPIVLVIGDDWLVMDARGLLRSVFWRRVAKPGLSLSELL |
| | | NVTPTGLFSGDPVIDPKRGLVTFTSKLGVVAVHSRKPTRGKKS |
| | | KDLLLKMTKPTDDGMPRHVGMVAIDLGQTNPVAAEYSRVV |
| | | QSDAGTLKQEPVSRGVLPDDLLKDVARYRRAYDLTEESIRQE |
| | | AIALLSEGHRAEVTKLDQTTANETKRLLVDRGVSESLPWEKM |
| | | SSNTTYISDCLVALGKTDDVFFVPKAKKGKKETGIAVKRKDH |
| | | GWSKLLRPRTSPEARKALNENQWAVKRASPEYERLSRRKLEL |
| | | GRRCVNHIIQETKRWTQCEDIVVVLEDLNVGFFHGSGKRPDG |
| | | WDNFFVSKRENRWFIQVLHKAFGDLATHRGTHVIEVHPARTS |
| | | ITCIKCGHCDAGNRDGESFVCLASACGDRRHADLEVATRNVA |
| | | RVAITGERMPPSEQARDVQKAGGARKRKPSARNVKSSYPAV |
| | | EPAPASP |
| CasΦ.36 | SEQ ID | MSDNKMKKLSKEEKPLTPLQILIRKYIDKSQYPSGFKTTIIKQA |
| | NO: 177 | GVRIKSVKSEQDEINLANWIISKYDPTYIKRDFNPSAKCQIIATS |
| | | RSVADFDIVKMSNKVQEIFFASSHLDKNVFDIGKSKSDHDSW |
| | | FERNNVDRGIYTYSNVQGMNLIFSNTKNTYLGVAVKAQNKFS |
| | | SKMKRIQDINNFRITNHQSPLPIPDEIKIYDDAGFLLNPPGVNP |
| | | NIFGYQSCLLKPLENKEIISKTSFPEYSRLPADMIEVNYKISNRL |
| | | KFSNDQKGFIQFKDKLNLFKINSQELFSKRRRLSGQPILLVASF |
| | | GDDWVVLDGRGLLRQVYYRGIAKPGSITISELLGFFTGDPIVD |
| | | PIRGVVSLGFKPGVLSQETLKTTSARIFAEKLPNLVLNNNVGL |
| | | MSIDLGQTNPVSYRLSEITSNMSVEHICSDFLSQDQISSIEKAKT |
| | | SLDNLEEEIAIKAVDHLSDEDKINFANFSKLNLPEDTRQSLFEK |
| | | YPELIGSKLDFGSMGSGTSYIADELIKFENKDAFYPSGKKKFD |
| | | LSFSRDLRKKLSDETRKSYNDALFLEKRTNDKYLKNAKRRKQ |
| | | IVRTVANSLVSKIEELGLTPVINIENLAMSGGFFDGRGKREKG |
| | | WDNFFKVKKENRWVMKDFHKAFSELSPHHGVIVIESPPYCTS |
| | | VTCTKCNFCDKKNRNGHKFTCQRCGLDANADLDIATENLEK |
| | | VAISGKRMPGSERSSDERKVAVARKAKSPKGKAIKGVKCTIT |
| | | DEPALLSANSQDCSQSTS |
| CasΦ.37 | SEQ ID | MALSLAEVRERHFKGLRFRSSYLKRAGKILKKEGEAACVAYL |
| | NO: 178 | TGKDEESPPNFKPPAKCDVVAQSRPFEEWPIVQASVAVQSYV |
| | | YGLTKEAFEAFNPGTTKQSHEACLAATGIDTCGYSNVQGLNL |
| | | IFRQAKNRYEGVITKVENRNKKAKKKLTRKNEWRQKNGHSE |
| | | LPEAPEELTFNDEGRLLQPPGINPSLYTYQQISPTPWSPKDSSIL |
| | | PPQYAGYERDPNAPIPFGVAKDRLTIASGCPGYIPEWMRTAGE |
| | | KTNPRTQKKFMHPGLSTRKNKRMRLPRSVRSAPLGALLVTIH |
| | | LGEDWLVLDVRGLLRNARWRGVAPKDISTQGLLNLFTGDPVI |
| | | DTRRGVVTFTYKPETVGIHSRTWLYKGKQTKEVLEKLTQDQT |
| | | VALVAIDLGQTNPVSAAASRVSRSGENLSIETVDRFFLPDELIK |
| | | ELRLYRMAHDRLEERIREESTLALTEAQQAEVRALEHVVRDD |
| | | AKNKVCAAFNLDAASLPWDQMTSNTTYLSEAILAQGVSRDQ |
| | | VFFTPNPKKGSKEPVEVMRKDRAWVYAFKAKLSEETRKAKN |
| | | EALWALKRASPDYARLSKRREELCRRSVNMVINRAKKRTQC |
| | | QVVIPVLEDLNIGFFHGSGKRLPGWDNFFVAKKENRWLMNG |
| | | LHKSFSDLAVHRGFYVFEVMPHRTSITCPACGHCDSENRDGE |
| | | AFVCLSCKRTYHADLDVATHNLTQVAGTGLPMPEREHPGGT |
| | | KKPGGSRKPESPQTHAPILHRTDYSESADRLGS |
| CasΦ.45 | SEQ ID | QAVIKYLSDKGAVDPPDFRPPAKCNIIAQSRPFDEWPICKASM |
| | NO: 179 | AIQQHIYGLTKNEFDESSPGTSSASHEQWFAKTGVDTHGFTH |
| | | VQGLNLIFQHAKKRYEGVIKKVENYNEKERKKFEGINERRSK |
| | | EGMPLLEPRLRTAFGDDGKFAEKPGVNPSIYLYQQTSPRPYD |
| | | KTKHPYVHAPFELKEITTIPTQDDRLKIPFGAPGHVPEKHRSQL |
| | | SMAKHKRRRAWYALSQNKPRPPKDGSKGRRSVRDLADLKA |
| | | ASLADAIPLVSRVGFDWVVIDGRGLLRNLRWRKLAHEGMTV |
| | | EEMLGFFSGDPVIDPRRNVATFIYKAEHATVKSRKPIGGAKRA |
| | | REELLKATASSDGVIRQVGLISVDLGQTNPVAYEISRMHQAN |
| | | GELVAEHLEYGLLNDEQVNSIQRYRAAWDSMNESFRQKAIES |
| | | LSMEAQDEIMQASTGAAKRTREAVLTMFGPNATLPWSRMSS |
| | | NTTCISDALIEVGKEEETNFVTSNGPRKRTDAQWAAYLRPRV |
| | | NPETRALLNQAVWDLMKRSDEYERLSKRKLEMARQCVNFV |
| | | VARAEKLTQCNNIGIVLENLVVRNFHGSGRRESGWEGFFEPK |
| | | RENRWFMQVLHKAFSDLAQHRGVMVFEVHPAYSSQTCPACR |
| | | YVDPKNRSSEDRERFKCLKCGRSFNADREVATFNIREIARTGV |
| | | GLPKPDCERSRDVQTPGTARKSGRSLKSQDNLSEPKRVLQSK |
| | | TRKKITSTETQNEPLATDLKT |
| CasΦ.38 | SEQ ID | MIKEQSELSKLIEKYYPGKKFYSNDLKQAGKHLKKSEHLTAK |
| | NO: 180 | ESEELTVEFLKSCKEKLYDFRPPAKALIISTSRPFEEWPIYKASE |
| | | SIQKYIYSLTKEELEKYNISTDKTSQENFFKESLIDNYGFANVS |
| | | GLNLIFQHTKAIYDGVLKKVNNRNNKILKKYKRKIEEGIEIDSP |
| | | ELEKAIDESGHFINPPGINKNIYCYQQVSPTIFNSFKETKIICPFN |
| | | YKRNPNDIIQKGVIDRLAIPFGEPGYIPDHQRDKVNKHKKRIR |
| | | KYYKNNENKNKDAILAKINIGEDWVLFDLRGLLRNAYWRKL |
| | | IPKQGITPQQLLDMFSGDPVIDPIKNNITFIYKESIIPIHSESIIKTK |
| | | KSKELLEKLTKDEQIALVSIDLGQTNPVAARFSRLSSDLKPEH |
| | | VSSSFLPDELKNEICRYREKSDLLEIEIKNKAIKMLSQEQQDEI |
| | | KLVNDISSEELKNSVCKKYNIDNSKIPWDKMNGFTTFIADEFI |
| | | NNGGDKSLVYFTAKDKKSKKEKLVKLSDKKIANSFKPKISKE |
| | | TREILNKITWDEKISSNEYKKLSKRKLEFARRATNYLINQAKK |
| | | ATRLNNVVLVVEDLNSKFFHGSGKREDGWDNFFIPKKENRW |
| | | FIQALHKSLTDVSIHRGINVIEVRPERTSITCPKCGCCDKENRK |
| | | GEDFKCIKCDSVYHADLEVATFNIEKVAITGESMPKPDCERLG |
| | | GEESIG |
| CasΦ.39 | SEQ ID | VAFLDGKEVDEPYTLQPPAKCHILAVSRPIEEWPIARVTMAVQ |
| | NO: 181 | EHVYALPVHEVEKSRPETTEGSRSAWFKNSGVSNHGVTHAQ |
| | | TLNAILKNAYNVYNGVIKKVENRNAKKRDSLAAKNKSRERK |
| | | GLPHFKADPPELATDEQGYLLQPPSPNSSVYLVQQHLRTPQID |
| | | LPSGYTGPVVDPRSPIPSLIPIDRLAIPPGQPGYVPLHDREKLTS |
| | | NKHRRMKLPKSLRAQGALPVCFRVFDDWAVVDGRGLLRHA |
| | | QYRRLAPKNVSIAELLELYTGDPVIDIKRNLMTFRFAEAVVEV |
| | | TARKIVEKYHNKYLLKLTEPKGKPVREIGLVSIDLNVQRLIAL |
| | | AIYRVHQTGESQLALSPCLHREILPAKGLGDFDKYKSKFNQLT |
| | | EEILTAAVQTLTSAQQEEYQRYVEESSHEAKADLCLKYSITPH |
| | | ELAWDKMTSSTQYISRWLRDHGWNASDFTQITKGRKKVERL |
| | | WSDSRWAQELKPKLSNETRRKLEDAKHDLQRANPEWQRLA |
| | | KRKQEYSRHLANTVLSMAREYTACETVVIAIENLPMKGGFVD |
| | | GNGSRESGWDNFFTHKKENRWMIKDIHKALSDLAPNRGVHV |
| | | LEVNPQYTSQTCPECGHRDKANRDPIQRERFCCTHCGAQRHA |
| | | DLEVATHNIAMVATTGKSLTGKSLAPQRLQ |
| CasΦ.42 | SEQ ID | LEIPEGEPGHVPWFQRMDIPEGQIGHVNKIQRFNFVHGKNSGK |
| | NO: 182 | VKFSDKTGRVKRYHHSKYKDATKPYKFLEESKKVSALDSILA |
| | | IITIGDDWVVFDIRGLYRNVFYRELAQKGLTAVQLLDLFTGDP |
| | | VIDPKKGIITFSYKEGVVPVFSQKIVSRFKSRDTLEKLTSQGPV |
| | | ALLSVDLGQNEPVAARVCSLKNINDKIALDNSCRIPFLDDYKK |
| | | QIKDYRDSLDELEIKIRLEAINSLDVNQQVEIRDLDVFSADRAK |
| | | ASTVDMFDIDPNLISWDSMSDARFSTQISDLYLKNGGDESRV |
| | | YFEINNKRIKRSDYNISQLVRPKLSDSTRKNLNDSIWKLKRTSE |
| | | EYLKLSKRKLELSRAVVNYTIRQSKLLSGINDIVIILEDLDVKK |
| | | KFNGRGIRDIGWDNFFSSRKENRWFIPAFHKSFSELSSNRGLC |
| | | VIEVNPAWTSATCPDCGFCSKENRDGINFTCRKCGVSYHADI |
| | | DVATLNIARVAVLGKPMSGPADRERLGGTKKPRVARSRKDM |
| | | KRKDISNGTVEVMVTA |
| CasΦ.46 | SEQ ID | IPSFGYLDRLKIAKGQPGYIPEWQRETINPSKKVRRYWATNHE |
| | NO: 183 | KIRNAIPLVVFIGDDWVIIDGRGLLRDARRRKLADKNTTIEQL |
| | | LEMVSNDPVIDSTRGIATLSYVEGVVPVRSFIPIGEKKGREYLE |
| | | KSTQKESVTLLSVDIGQINPVSCGVYKVSNGCSKIDFLDKFFL |
| | | DKKHLDAIQKYRTLQDSLEASIVNEALDEIDPSFKKEYQNINS |
| | | QTSNDVKKSLCTEYNIDPEAISWQDITAHSTLISDYLIDNNITN |
| | | DVYRTVNKAKYKTNDFGWYKKFSAKLSKEAREALNEKIWEL |
| | | KIASSKYKKLSVRKKEIARTIANDCVKRAETYGDNVVVAMES |
| | | LTKNNKVMSGRGKRDPGWHNLGQAKVENRWFIQAISSAFED |
| | | KATHHGTPVLKVNPAYTSQTCPSCGHCSKDNRSSKDRTIFVC |
| | | KSCGEKFNADLDVATYNIAHVAFSGKKLSPPSEKSSATKKPRS |
| | | ARKSKKSRKS |
| CasΦ.47 | SEQ ID | SPIEKLLNGLLVKITFGNDWIICDARGLLDNVQKGIIHKSYFTN |
| | NO: 184 | KSSLVDLIDLFTCNPIVNYKNNVVTFCYKEGVVDVKSFTPIKS |
| | | GPKTQENLIKKLKYSRFQNEKDACVLGVGVDVGVTNPFAING |
| | | FKMPVDESSEWVMLNEPLFTIETSQAFREEIMAYQQRTDEMN |
| | | DQFNQQSIDLLPPEYKVEFDNLPEDINEVAKYNLLHTLNIPNN |
| | | FLWDKMSNTTQFISDYLIQIGRGTETEKTITTKKGKEKILTIRD |
| | | VNWFNTFKPKISEETGKARTEIKRDLQKNSDQFQKLAKSREQ |
| | | SCRTWVNNVTEEAKIKSGCPLIIFVIEALVKDNRVFSGKGHRA |
| | | IGWHNFGKQKNERRWWVQAIHKAFQEQGVNHGYPVILCPPQ |
| | | YTSQTCPKCNHVDRDNRSGEKFKCLKYGWIGNADLDVGAYN |
| | | IARVAITGKALSKPLEQKKIKKAKNKT |
| CasΦ.48 | SEQ ID | LLDNVQKGIIHKSYFTNKSSLVDLIDLFTCNPIVNYKNNVVTF |
| | NO: 185 | CYKEGVVDVKSFTPIKSGPKTQENLIKKLKYSRFQNEKDACV |
| | | LGVGVDVGVTNPFAINGFKMPVDESSEWVMLNEPLFTIETSQ |
| | | AFREEIMAYQQRTDEMNDQFNQQSIDLLPPEYKVEFDNLPEDI |
| | | NEVAKYNLLHTLNIPNNFLWDKMSNTTQFISDYLIQIGRGTET |
| | | EKTITTKKGKEKILTIRDVNWFNTFKPKISEETGKARTEIKRDL |
| | | QKNSDQFQKLAKSREQSCRTWVNNVTEEAKIKSGCPLIIFVIE |
| | | ALVKDNRVFSGKGHRAIGWHNFGKQKNERRWWVQAIHKAF |
| | | QEQGVNHGYPVILCPPQYTSQTCPKCNHVDRDNRSGEKFKCL |
| | | KYGWIGNADLDVGAYNIARVAITGKALSKPLEQKKIKKAKN |
| | | KT |
| CasΦ.49 | SEQ ID | MIKPTVSQFLTPGFKLIRNHSRTAGLKLKNEGEEACKKFVREN |
| | NO: 186 | EIPKDECPNFQGGPAIANIIAKSREFTEWEIYQSSLAIQEVIFTLP |
| | | KDKLPEPILKEEWRAQWLSEHGLDTVPYKEAAGLNLIIKNAV |
| | | NTYKGVQVKVDNKNKNNLAKINRKNEIAKLNGEQEISFEEIK |
| | | AFDDKGYLLQKPSPNKSIYCYQSVSPKPFITSKYHNVNLPEEYI |
| | | GYYRKSNEPIVSPYQFDRLRIPIGEPGYVPKWQYTFLSKKENK |
| | | RRKLSKRIKNVSPILGIICIKKDWCVFDMRGLLRTNHWKKYH |
| | | KPTDSINDLFDYFTGDPVIDTKANVVRFRYKMENGIVNYKPV |
| | | REKKGKELLENICDQNGSCKLATVDVGQNNPVAIGLFELKKV |
| | | NGELTKTLISRHPTPIDFCNKITAYRERYDKLESSIKLDAIKQLT |
| | | SEQKIEVDNYNNNFTPQNTKQIVCSKLNINPNDLPWDKMISGT |
| | | HFISEKAQVSNKSEIYFTSTDKGKTKDVMKSDYKWFQDYKPK |
| | | LSKEVRDALSDIEWRLRRESLEFNKLSKSREQDARQLANWISS |
| | | MCDVIGIENLVKKNNFFGGSGKREPGWDNFYKPKKENRWWI |
| | | NAIHKALTELSQNKGKRVILLPAMRTSITCPKCKYCDSKNRN |
| | | GEKFNCLKCGIELNADIDVATENLATVAITAQSMPKPTCERSG |
| | | DAKKPVRARKAKAPEFHDKLAPSYTVVLREAVKRPAATKK |
| | | AGQAKKKKEF |
| | | (Bold sequence is Nuclear Localization Signal) |

[0118] In some embodiments, any of the programmable CasΦ nuclease of the present disclosure (e.g., any one of SEQ ID NO: 139-SEQ ID NO: 186 or fragments or variants thereof) may include a nuclear localization signal (NLS). In some cases, said NLS may have a sequence of KRPAATKKAGQAKKKKEF (SEQ ID NO: 187).

[0119] A CasΦ polypeptide or a variant thereof can comprise at least 70%, at least 75%, at least 80%, at least 85%, at least 90%, at least 92%, at least 95%, at least 97%, at least 99%, or 100% sequence identity with any one of SEQ ID NO: 139-SEQ ID NO: 186.

[0120] In some embodiments, the CasΦ nuclease comprises more than 200 amino acids, more than 300 amino acids, more than 400 amino acids. In some embodiments, the CasΦ nuclease comprises less than 1500 amino acids, less than 1000 amino acids or less than 900 amino acids. In some embodiments, the CasΦ nuclease comprises between 200 and 1500 amino acids, between 300 and 1000 amino acids, or between 400 and 900 amino acids. In preferred embodiments, the CasΦ nuclease comprises between 400 and 900 amino acids.

[0121] A programmable CasΦ nuclease of the present disclosure may have a single active site in a RuvC domain that is capable of catalyzing pre-crRNA processing and nicking or cleaving of nucleic acids. This compact catalytic site may render the programmable CasΦ nuclease especially advantageous for genome engineering and new functionalities for genome manipulation.

[0122] In some embodiments, the RuvC domain is a RuvC-like domain. Various RuvC-like domains are known in the art and are easily identified using online tools such as InterPro (https://www.ebi.ac.uk/interpro/). For example, a RuvC-like domain may be a domain which shares homology with a region of TnpB proteins of the IS605 and other related families of transposons, as described in review articles such as Shmakov et al. (Nature Reviews Microbiology volume 15, pages 169-182(2017)) and Koonin E. V. and Makarova K. S. (2019, Phil. Trans. R. Soc., B 374:20180087). In some embodiments, the RuvC-like domain shares homology with the transposase IS605, OrfB, C-terminal. A transposase IS605, OrfB, C-terminal is easily identified by the skilled person using bioinformatics tools, such as PFAM (Finn et al. (Nucleic Acids Res. 2014 Jan. 1; 42(Database issue): D222-D230); El-Gebali et al. (2019) Nucleic Acids Res. doi:10.1093/nar/gky995). PFAM is a database of protein families in which each entry is composed of a seed alignment which forms the basis to build a profile hidden Markov model (HMM) using the HMMER software (hmmer.org). It is readily accessible via pfam.xfam.org, maintained by EMBL-EBI, which easily allows an amino acid sequence to be analyzed against the current release of PFAM (e.g. version 33.1 from May 2020), but local builds can also be implemented using publicly- and freely-available database files and tools. A transposase IS605, OrfB, C-terminal is easily identified by the skilled person using the HMM PF07282. PF07282 is reproduced for reference in FIG. 11 (accession number PF07282.12). The skilled person would also be able to identify a RuvC domain, for example with the HMM PF18516, using the PFAM tool. PF18516 is reproduced for reference in FIG. 12 (accession number PF18516.2). In some embodiments, the programmable CasΦ nuclease comprises a RuvC-like domain which matches PFAM family PF07282 but does not match PFAM family PF18516, as assessed using the PFAM tool (e.g. using PFAM version 33.1, and the HMM accession numbers PF07282.12 and PF18516.2). PFAM searches should ideally be performed using an E-value cut-off set at 1.0.

### Detector Nucleic Acids

[0123] Described herein are reagents comprising a single stranded detector nucleic acid comprising a detection moiety, wherein the detector nucleic acid is capable of being cleaved by the activated programmable nuclease, thereby generating a first detectable signal. As used herein, a detector nucleic acid is used interchangeably with reporter or reporter molecule. As described herein, nucleic acid sequences comprising DNA may be detected using a DNA-activated programmable RNA nuclease, a DNA-activated programmable DNA nuclease, or a combination thereof, and other reagents disclosed herein. The DNA-activated programmable RNA nuclease may be activated and cleave the detector RNA upon binding of an engineered guide nucleic acid to a target DNA. In some cases, the detector nucleic acid is a single-stranded nucleic acid sequence comprising ribonucleotides. Additionally, detection by a DNA-activated programmable RNA nuclease, which can cleave RNA reporters, allows for multiplexing with a DNA-activated programmable DNA nuclease that can cleave DNA reporters (e.g., Type V CRISPR enzyme). In some cases, the detector nucleic acid is a single-stranded nucleic acid sequence comprising deoxyribonucleotides.

[0124] The detector nucleic acid can be a single-stranded nucleic acid sequence comprising at least one deoxyribonucleotide and at least one ribonucleotide. In some cases, the detector nucleic acid is a single-stranded nucleic acid comprising at least one ribonucleotide residue at an internal position that functions as a cleavage site. In some cases, the detector nucleic acid comprises at least 2, 3, 4, 5, 6, 7, 8, 9, or 10 ribonucleotide residues at an internal position. In some cases, the detector nucleic acid comprises from 2 to 10, from 3 to 9, from 4 to 8, or from 5 to 7 ribonucleotide residues at an internal position. Sometimes the ribonucleotide residues are continuous. Alternatively, the ribonucleotide residues are interspersed in between non-ribonucleotide residues. In some cases, the detector nucleic acid has only ribonucleotide residues. In some cases, the detector nucleic acid has only deoxyribonucleotide residues. In some cases, the detector nucleic acid comprises nucleotides resistant to cleavage by the programmable nuclease described herein. In some cases, the detector nucleic acid comprises synthetic nucleotides. In some cases, the detector nucleic acid comprises at least one ribonucleotide residue and at least one non-ribonucleotide residue. In some cases, the detector nucleic acid is 5-20, 5-15, 5-10, 7-20, 7-15, or 7-10 nucleotides in length. In some cases, the detector nucleic acid is from 3 to 20, from 4 to 10, from 5 to 10, or from 5 to 8 nucleotides in length. In some cases, the detector nucleic acid comprises at least one uracil ribonucleotide. In some cases, the detector nucleic acid comprises at least two uracil ribonucleotides. Sometimes the detector nucleic acid has only uracil ribonucleotides. In some cases, the detector nucleic acid comprises at least one adenine ribonucleotide. In some cases, the detector nucleic acid comprises at least two adenine ribonucleotide. In some cases, the detector nucleic acid has only adenine ribonucleotides. In some cases, the detector nucleic acid comprises at least one cytosine ribonucleotide. In some cases, the detector nucleic acid comprises at least two cytosine ribonucleotide. In some cases, the detector nucleic acid comprises at least one guanine ribonucleotide. In some cases, the detector nucleic acid comprises at least two guanine ribonucleotide. A detector nucleic acid can comprise only unmodified ribonucleotides, only unmodified deoxyribonucleotides, or a combination thereof. In some cases, the detector nucleic acid is from 5 to 12 nucleotides in length. In some cases, the detector nucleic acid is at least 2, 3, 4, 5, 6, 7, 8, 9, 10, 11, 12, 13, 14, 15, 16, 17, 18, 19, 20, 21, 22, 23, 24, 25, 26, 27, 28, 29, or 30 nucleotides in length. In some cases, the detector nucleic acid is 2, 3, 4, 5, 6, 7, 8, 9, 10, 11, 12, 13, 14, 15, 16, 17, 18, 19, 20, 21, 22, 23, 24, 25, 26, 27, 28, 29, or 30 nucleotides in length. For cleavage by a programmable nuclease comprising Cas13, a detector nucleic acid can be 5, 8, or 10 nucleotides in length. For cleavage by a programmable nuclease comprising Cas12, a detector nucleic acid can be 10 nucleotides in length.

[0125] The single stranded detector nucleic acid comprises a detection moiety capable of generating a first detectable signal. Sometimes the detector nucleic acid comprises a protein capable of generating a signal. A signal can be a calorimetric, potentiometric, amperometric, optical (e.g., fluorescent, colorometric, etc.), or piezo-electric signal. In some cases, a detection moiety is on one side of the cleavage site. Optionally, a quenching moiety is on the other side of the cleavage site. Sometimes the quenching moiety is a fluorescence quenching moiety. In some cases, the quenching moiety is 5′ to the cleavage site and the detection moiety is 3′ to the cleavage site. In some cases, the detection moiety is 5′ to the cleavage site and the quenching moiety is 3′ to the cleavage site. Sometimes the quenching moiety is at the 5′ terminus of the detector nucleic acid. Sometimes the detection moiety is at the 3′ terminus of the detector nucleic acid. In some cases, the detection moiety is at the 5′ terminus of the detector nucleic acid. In some cases, the quenching moiety is at the 3′ terminus of the detector nucleic acid. In some cases, the single-stranded detector nucleic acid is at least one population of the single-stranded nucleic acid capable of generating a first detectable signal. In some cases, the single-stranded detector nucleic acid is a population of the single stranded nucleic acid capable of generating a first detectable signal. Optionally, there are more than one population of single-stranded detector nucleic acid. In some cases, there are 2, 3, 4, 5, 6, 7, 8, 9, 10, 11, 12, 13, 14, 15, 20, 30, 40, 50, or greater than 50, or any number spanned by the range of this list of different populations of single-stranded detector nucleic acids capable of generating a detectable signal. In some cases there are from 2 to 50, from 3 to 40, from 4 to 30, from 5 to 20, or from 6 to 10 different populations of single-stranded detector nucleic acids capable of generating a detectable signal.

TABLE 5
Exemplary Single Stranded Detector Nucleic Acid

| 5′ Detection | | |
|---|---|---|
| Moiety* | Sequence (SEQ ID NO:) | 3′ Quencher* |
| /56-FAM/ | rUrUrUrUrU (SEQ ID NO: 1) | /3IABkFQ/ |
| /5IRD700/ | rUrUrUrUrU (SEQ ID NO: 1) | /3IRQC1N/ |
| /5TYE665/ | rUrUrUrUrU (SEQ ID NO: 1) | /3IAbRQSp/ |
| /5Alex594N/ | rUrUrUrUrU (SEQ ID NO: 1) | /3IAbRQSp/ |
| /5ATTO633N/ | rUrUrUrUrU (SEQ ID NO: 1) | /3IAbRQSp/ |
| /56-FAM/ | rUrUrUrUrUrUrUrU (SEQ ID NO: 2) | /3IABkFQ/ |
| /5IRD700/ | rUrUrUrUrUrUrUrU (SEQ ID NO: 2) | /3IRQC1N/ |
| /5TYE665/ | rUrUrUrUrUrUrUrU (SEQ ID NO: 2) | /3IAbRQSp/ |
| /5Alex594N/ | rUrUrUrUrUrUrUrU (SEQ ID NO: 2) | /3IAbRQSp/ |
| /5ATTO633N/ | rUrUrUrUrUrUrUrU (SEQ ID NO: 2) | /3IAbRQSp/ |
| /56-FAM/ | rUrUrUrUrUrUrUrUrUrU (SEQ ID NO: 3) | /3IABkFQ/ |
| /5IRD700/ | rUrUrUrUrUrUrUrUrUrU (SEQ ID NO: 3) | /3IRQC1N/ |
| /5TYE665/ | rUrUrUrUrUrUrUrUrUrU (SEQ ID NO: 3) | /3IAbRQSp/ |
| /5Alex594N/ | rUrUrUrUrUrUrUrUrUrU (SEQ ID NO: 3) | /3IAbRQSp/ |
| /5ATTO633N/ | rUrUrUrUrUrUrUrUrUrU (SEQ ID NO: 3) | /3IAbRQSp/ |
| /56-FAM/ | TTTTrUrUTTTT (SEQ ID NO: 4) | /3IABkFQ/ |
| /5IRD700/ | TTTTrUrUTTTT (SEQ ID NO: 4) | /3IRQC1N/ |
| /5TYE665/ | TTTTrUrUTTTT (SEQ ID NO: 4) | /3IAbRQSp/ |
| /5Alex594N/ | TTTTrUrUTTTT (SEQ ID NO: 4) | /3IAbRQSp/ |
| /5ATTO633N/ | TTTTrUrUTTTT(SEQ ID NO: 4) | /3IAbRQSp/ |
| /56-FAM/ | TTrUrUTT (SEQ ID NO: 5) | /3IABkFQ/ |
| /5IRD700/ | TTrUrUTT (SEQ ID NO: 5) | /3IRQC1N/ |
| /5TYE665/ | TTrUrUTT (SEQ ID NO: 5) | /3IAbRQSp/ |
| /5Alex594N/ | TTrUrUTT (SEQ ID NO: 5) | /3IAbRQSp/ |
| /5ATTO633N/ | TTrUrUTT (SEQ ID NO: 5) | /3IAbRQSp/ |
| /56-FAM/ | TArArUGC (SEQ ID NO: 6) | /3IABkFQ/ |
| /5IRD700/ | TArArUGC (SEQ ID NO: 6) | /3IRQC1N/ |
| /5TYE665/ | TArArUGC (SEQ ID NO: 6) | /3IAbRQSp/ |
| /5Alex594N/ | TArArUGC (SEQ ID NO: 6) | /3IAbRQSp/ |
| /5ATTO633N/ | TArArUGC (SEQ ID NO: 6) | /3IAbRQSp/ |
| /56-FAM/ | TArUrGGC (SEQ ID NO: 7) | /3IABkFQ/ |
| /5IRD700/ | TArUrGGC (SEQ ID NO: 7) | /3IRQC1N/ |
| /5TYE665/ | TArUrGGC (SEQ ID NO: 7) | /3IAbRQSp/ |
| /5Alex594N/ | TArUrGGC (SEQ ID NO: 7) | /3IAbRQSp/ |
| /5ATTO633N/ | TArUrGGC (SEQ ID NO: 7) | /3IAbRQSp/ |
| /56-FAM/ | rUrUrUrUrU (SEQ ID NO: 8) | /3IABkFQ/ |
| /5IRD700/ | rUrUrUrUrU (SEQ ID NO: 8) | /3IRQC1N/ |
| /5TYE665/ | rUrUrUrUrU (SEQ ID NO: 8) | /3IAbRQSp/ |
| /5Alex594N/ | rUrUrUrUrU (SEQ ID NO: 8) | /3IAbRQSp/ |
| /5ATTO633N/ | rUrUrUrUrU (SEQ ID NO: 8) | /3IAbRQSp/ |
| /56-FAM/ | TTATTATT (SEQ ID NO: 9) | /3IABkFQ/ |
| /56-FAM/ | TTATTATT (SEQ ID NO: 9) | /3IABkFQ/ |
| /5IRD700/ | TTATTATT (SEQ ID NO: 9) | /3IRQC1N/ |
| /5TYE665/ | TTATTATT (SEQ ID NO: 9) | /3IAbRQSp/ |
| /5Alex594N/ | TTATTATT (SEQ ID NO: 9) | /3IAbRQSp/ |
| /5ATTO633N/ | TTATTATT (SEQ ID NO: 9) | /3IAbRQSp/ |
| /56-FAM/ | TTTTTT (SEQ ID NO: 10) | /3IABkFQ/ |
| /56-FAM/ | TTTTTTTT (SEQ ID NO: 11) | /3IABkFQ/ |
| /56-FAM/ | TTTTTTTTTT (SEQ ID NO: 12) | /3IABkFQ/ |
| /56-FAM/ | TTTTTTTTTTTT (SEQ ID NO: 13) | /3IABkFQ/ |
| /56-FAM/ | TTTTTTTTTTTTTT (SEQ ID NO: 14) | /3IABkFQ/ |
| /56-FAM/ | AAAAAA (SEQ ID NO: 15) | /3IABkFQ/ |
| /56-FAM/ | CCCCCC (SEQ ID NO: 16) | /3IABkFQ/ |
| /56-FAM/ | GGGGGG (SEQ ID NO: 17) | /3IABkFQ/ |
| /56-FAM/ | TTATTATT (SEQ ID NO: 9) | /3IABkFQ/ |

/56-FAM/: 5′ 6-Fluorescein (Integrated DNA Technologies)
/3IABkFQ/: 3′ Iowa Black FQ (Integrated DNA Technologies)
/5IRD700/: 5′ IRDye 700 (Integrated DNA Technologies)
/5TYE665/: 5′ TYE 665 (Integrated DNA Technologies)
/5Alex594N/: 5′ Alexa Fluor 594 (NHS Ester) (Integrated DNA Technologies)
/5ATTO633N/: 5′ ATTO TM 633 (NHS Ester) (Integrated DNA Technologies)
/3IRQC1N/: 3′ IRDye QC-1 Quencher (Li-Cor)
/3IAbRQSp/: 3′ Iowa Black RQ (Integrated DNA Technologies)
rU: uracil ribonucleotide
rG: guanine ribonucleotide
*This Table refers to the detection moiety and quencher moiety as their tradenames and their source is identified. However, alternatives, generics, or non-tradename moieties with similar function from other sources can also be used.

[0126] A detection moiety can be an infrared fluorophore. A detection moiety can be a fluorophore that emits fluorescence in the range of from 500 nm and 720 nm. A detection moiety can be a fluorophore that emits fluorescence in the range of from 500 nm and 720 nm. In some cases, the detection moiety emits fluorescence at a wavelength of 700 nm or higher. In other cases, the detection moiety emits fluorescence at about 660 nm or about 670 nm. In some cases, the detection moiety emits fluorescence in the range of from 500 to 520, 500 to 540, 500 to 590, 590 to 600, 600 to 610, 610 to 620, 620 to 630, 630 to 640, 640 to 650, 650 to 660, 660 to 670, 670 to 680, 690 to 690, 690 to 700, 700 to 710, 710 to 720, or 720 to 730 nm. In some cases, the detection moiety emits fluorescence in the range from 450 nm to 750 nm, from 500 nm to 650 nm, or from 550 to 650 nm. A detection moiety can be a fluorophore that emits a fluorescence in the same range as 6-Fluorescein, IRDye 700, TYE 665, Alex Fluor, or ATTO TM 633 (NHS Ester). A detection moiety can be fluorescein amidite, 6-Fluorescein, IRDye 700, TYE 665, Alex Fluor 594, or ATTO TM 633 (NHS Ester). A detection moiety can be a fluorophore that emits a fluorescence in the same range as 6-Fluorescein (Integrated DNA Technologies), IRDye 700 (Integrated DNA Technologies), TYE 665 (Integrated DNA Technologies), Alex Fluor 594 (Integrated DNA Technologies), or ATTO TM 633 (NHS Ester) (Integrated DNA Technologies). A detection moiety can be fluorescein amidite, 6-Fluorescein (Integrated DNA Technologies), IRDye 700 (Integrated DNA Technologies), TYE 665 (Integrated DNA Technologies), Alex Fluor 594 (Integrated DNA Technologies), or ATTO TM 633 (NHS Ester) (Integrated DNA Technologies). Any of the detection moieties described herein can be from any commercially available source, can be an alternative with a similar function, a generic, or a non-tradename of the detection moieties listed.

[0127] A detection moiety can be chosen for use based on the type of sample to be tested. For example, a detection moiety that is an infrared fluorophore is used with a urine sample. As another example, SEQ ID NO: 1 with a fluorophore that emits a fluorescence around 520 nm is used for testing in non-urine samples, and SEQ ID NO: 8 with a fluorophore that emits a fluorescence around 700 nm is used for testing in urine samples.

[0128] A quenching moiety can be chosen based on its ability to quench the detection moiety. A quenching moiety can be a non-fluorescent fluorescence quencher. A quenching moiety can quench a detection moiety that emits fluorescence in the range of from 500 nm and 720 nm. A quenching moiety can quench a detection moiety that emits fluorescence in the range of from 500 nm and 720 nm. In some cases, the quenching moiety quenches a detection moiety that emits fluorescence at a wavelength of 700 nm or higher. In other cases, the quenching moiety quenches a detection moiety that emits fluorescence at about 660 nm or about 670 nm. In some cases, the quenching moiety quenches a detection moiety that emits fluorescence in the range of from 500 to 520, 500 to 540, 500 to 590, 590 to 600, 600 to 610, 610 to 620, 620 to 630, 630 to 640, 640 to 650, 650 to 660, 660 to 670, 670 to 680, 690 to 690, 690 to 700, 700 to 710, 710 to 720, or 720 to 730 nm. In some cases, the quenching moiety quenches a detection moiety that emits fluorescence in the range from 450 nm to 750 nm, from 500 nm to 650 nm, or from 550 to 650 nm. A quenching moiety can quench fluorescein amidite, 6-Fluorescein, IRDye 700, TYE 665, Alex Fluor 594, or ATTO TM 633 (NHS Ester). A quenching moiety can be Iowa Black RQ, Iowa Black FQ or IRDye QC-1 Quencher. A quenching moiety can quench fluorescein amidite, 6-Fluorescein (Integrated DNA Technologies), IRDye 700 (Integrated DNA Technologies), TYE 665 (Integrated DNA Technologies), Alex Fluor 594 (Integrated DNA Technologies), or ATTO TM 633 (NHS Ester) (Integrated DNA Technologies). A quenching moiety can be Iowa Black RQ (Integrated DNA Technologies), Iowa Black FQ (Integrated DNA Technologies) or IRDye QC-1 Quencher (LiCor). Any of the quenching moieties described herein can be from any commercially available source, can be an alternative with a similar function, a generic, or a non-tradename of the quenching moieties listed.

[0129] The generation of the detectable signal from the release of the detection moiety indicates that cleavage by the programmable nuclease has occurred and that the sample contains the target nucleic acid. In some cases, the detection moiety comprises a fluorescent dye. Sometimes the detection moiety comprises a fluorescence resonance energy transfer (FRET) pair. In some cases, the detection moiety comprises an infrared (IR) dye. In some cases, the detection moiety comprises an ultraviolet (UV) dye. Alternatively or in combination, the detection moiety comprises a polypeptide. Sometimes the detection moiety comprises a biotin. Sometimes the detection moiety comprises at least one of avidin or streptavidin. In some instances, the detection moiety comprises a polysaccharide, a polymer, or a nanoparticle. In some instances, the detection moiety comprises a gold nanoparticle or a latex nanoparticle.

[0130] A detection moiety can be any moiety capable of generating a calorimetric, potentiometric, amperometric, optical (e.g., fluorescent, colorometric, etc.), or piezo-electric signal. A detector nucleic acid, sometimes, is protein-nucleic acid that is capable of generating a calorimetric, potentiometric, amperometric, optical (e.g., fluorescent, colorometric, etc.), or piezo-electric signal upon cleavage of the nucleic acid. Often a calorimetric signal is heat produced after cleavage of the detector nucleic acids. Sometimes, a calorimetric signal is heat absorbed after cleavage of the detector nucleic acids. A potentiometric signal, for example, is electrical potential produced after cleavage of the detector nucleic acids. An amperometric signal can be movement of electrons produced after the cleavage of detector nucleic acid. Often, the signal is an optical signal, such as a colorometric signal or a fluorescence signal. An optical signal is, for example, a light output produced after the cleavage of the detector nucleic acids. Sometimes, an optical signal is a change in light absorbance between before and after the cleavage of detector nucleic acids. Often, a piezo-electric signal is a change in mass between before and after the cleavage of the detector nucleic acid.

[0131] Often, the protein-nucleic acid is an enzyme-nucleic acid. The enzyme may be sterically hindered when present as in the enzyme-nucleic acid, but then functional upon cleavage from the nucleic acid. Often, the enzyme is an enzyme that produces a reaction with a substrate. An enzyme can be invertase. Often, the substrate of invertase is sucrose and DNS reagent. In some cases, it is preferred that the nucleic acid (e.g., DNA) and invertase are conjugated using a heterobifunctiona linker via sulfo-SMCC chemistry.

[0132] Sometimes the protein-nucleic acid is a substrate-nucleic acid. Often the substrate is a substrate that produces a reaction with an enzyme.

[0133] A protein-nucleic acid may be attached to a solid support. The solid support, for example, is a surface. A surface can be an electrode. Sometimes the solid support is a bead. Often the bead is a magnetic bead. Upon cleavage, the protein is liberated from the solid and interacts with other mixtures. For example, the protein is an enzyme, and upon cleavage of the nucleic acid of the enzyme-nucleic acid, the enzyme flows through a chamber into a mixture comprising the substrate. When the enzyme meets the enzyme substrate, a reaction occurs, such as a colorimetric reaction, which is then detected. As another example, the protein is an enzyme substrate, and upon cleavage of the nucleic acid of the enzyme substrate-nucleic acid, the enzyme flows through a chamber into a mixture comprising the enzyme. When the enzyme substrate meets the enzyme, a reaction occurs, such as a calorimetric reaction, which is then detected.

[0134] Often, the signal is a colorimetric signal or a signal visible by eye. In some instances, the signal is fluorescent, electrical, chemical, electrochemical, or magnetic. A signal can be a calorimetric, potentiometric, amperometric, optical (e.g., fluorescent, colorometric, etc.), or piezo-electric signal. In some cases, the detectable signal is a colorimetric signal or a signal visible by eye. In some instances, the detectable signal is fluorescent, electrical, chemical, electrochemical, or magnetic. In some cases, the first detection signal is generated by binding of the detection moiety to the capture molecule in the detection region, where the first detection signal indicates that the sample contained the target nucleic acid. Sometimes the system is capable of detecting more than one type of target nucleic acid, wherein the system comprises more than one type of engineered guide nucleic acid and more than one type of detector nucleic acid. In some cases, the detectable signal is generated directly by the cleavage event. Alternatively or in combination, the detectable signal is generated indirectly by the signal event. Sometimes the detectable signal is not a fluorescent signal. In some instances, the detectable signal is a colorimetric or color-based signal. In some cases, the detected target nucleic acid is identified based on its spatial location on the detection region of the support medium. In some cases, the second detectable signal is generated in a spatially distinct location than the first generated signal.

[0135] In some cases, the threshold of detection, for a subject method of detecting a single stranded target nucleic acid in a sample, is less than or equal to 10 nM. The term “threshold of detection” is used herein to describe the minimal amount of target nucleic acid that must be present in a sample in order for detection to occur. For example, when a threshold of detection is 10 nM, then a signal can be detected when a target nucleic acid is present in the sample at a concentration of 10 nM or more. In some cases, the threshold of detection is less than or equal to 5 nM, 1 nM, 0.5 nM, 0.1 nM, 0.05 nM, 0.01 nM, 0.005 nM, 0.001 nM, 0.0005 nM, 0.0001 nM, 0.00005 nM, 0.00001 nM, 10 μM, 1 μM, 500 fM, 250 fM, 100 fM, 50 fM, 10 fM, 5 fM, 1 fM, 500 attomole (aM), 100 aM, 50 aM, 10 aM, or 1 aM. In some cases, the threshold of detection is in a range of from 1 aM to 1 nM, 1 aM to 500 μM, 1 aM to 200 μM, 1 aM to 100 μM, 1 aM to 10 μM, 1 aM to 1 μM, 1 aM to 500 fM, 1 aM to 100 fM, 1 aM to 1 fM, 1 aM to 500 aM, 1 aM to 100 aM, 1 aM to 50 aM, 1 aM to 10 aM, 10 aM to 1 nM, 10 aM to 500 μM, 10 aM to 200 μM, 10 aM to 100 μM, 10 aM to 10 μM, 10 aM to 1 μM, 10 aM to 500 fM, 10 aM to 100 fM, 10 aM to 1 fM, 10 aM to 500 aM, 10 aM to 100 aM, 10 aM to 50 aM, 100 aM to 1 nM, 100 aM to 500 μM, 100 aM to 200 μM, 100 aM to 100 pM, 100 aM to 10 pM, 100 aM to 1 pM, 100 aM to 500 fM, 100 aM to 100 fM, 100 aM to 1 fM, 100 aM to 500 aM, 500 aM to 1 nM, 500 aM to 500 pM, 500 aM to 200 pM, 500 aM to 100 pM, 500 aM to 10 pM, 500 aM to 1 pM, 500 aM to 500 fM, 500 aM to 100 fM, 500 aM to 1 fM, 1 fM to 1 nM, 1 fM to 500 pM, 1 fM to 200 pM, 1 fM to 100 pM, 1 fM to 10 pM, 1 fM to 1 pM, 10 fM to 1 nM, 10 fM to 500 pM, 10 fM to 200 pM, 10 fM to 100 pM, 10 fM to 10 pM, 10 fM to 1 pM, 500 fM to 1 nM, 500 fM to 500 pM, 500 fM to 200 pM, 500 fM to 100 pM, 500 fM to 10 pM, 500 fM to 1 pM, 800 fM to 1 nM, 800 fM to 500 pM, 800 fM to 200 pM, 800 fM to 100 pM, 800 fM to 10 pM, 800 fM to 1 pM, from 1 pM to 1 nM, 1 pM to 500 pM, 1 pM to 200 pM, 1 pM to 100 pM, or 1 pM to 10 pM. In some cases, the threshold of detection in a range of from 800 fM to 100 pM, 1 pM to 10 pM, 10 fM to 500 fM, 10 fM to 50 fM, 50 fM to 100 fM, 100 fM to 250 fM, or 250 fM to 500 fM. In some cases the threshold of detection is in a range of from 2 aM to 100 pM, from 20 aM to 50 pM, from 50 aM to 20 pM, from 200 aM to 5 pM, or from 500 aM to 2 pM. In some cases, the minimum concentration at which a single stranded target nucleic acid is detected in a sample is in a range of from 1 aM to 1 nM, 10 aM to 1 nM, 100 aM to 1 nM, 500 aM to 1 nM, 1 fM to 1 nM, 1 fM to 500 pM, 1 fM to 200 pM, 1 fM to 100 pM, 1 fM to 10 pM, 1 fM to 1 pM, 10 fM to 1 nM, 10 fM to 500 pM, 10 fM to 200 pM, 10 fM to 100 pM, 10 fM to 10 pM, 10 fM to 1 pM, 500 fM to 1 nM, 500 fM to 500 pM, 500 fM to 200 pM, 500 fM to 100 pM, 500 fM to 10 pM, 500 fM to 1 pM, 800 fM to 1 nM, 800 fM to 500 pM, 800 fM to 200 pM, 800 fM to 100 pM, 800 fM to 10 pM, 800 fM to 1 pM, 1 pM to 1 nM, 1 pM to 500 pM, from 1 pM to 200 pM, 1 pM to 100 pM, or 1 pM to 10 pM. In some cases, the minimum concentration at which a single stranded target nucleic acid is detected in a sample is in a range of from 2 aM to 100 pM, from 20 aM to 50 pM, from 50 aM to 20 pM, from 200 aM to 5 pM, or from 500 aM to 2 pM. In some cases, the minimum concentration at which a single stranded target nucleic acid can be detected in a sample is in a range of from 1 aM to 100 pM. In some cases, the minimum concentration at which a single stranded target nucleic acid can be detected in a sample is in a range of from 1 fM to 100 pM. In some cases, the minimum concentration at which a single stranded target nucleic acid can be detected in a sample is in a range of from 10 fM to 100 pM. In some cases, the minimum concentration at which a single stranded target nucleic acid can be detected in a sample is in a range of from 800 fM to 100 pM. In some cases, the minimum concentration at which a single stranded target nucleic acid can be detected in a sample is in a range of from 1 pM to 10 pM. In some cases, the devices, systems, fluidic devices, kits, and methods described herein detect a target single-stranded nucleic acid in a sample comprising a plurality of nucleic acids such as a plurality of non-target nucleic acids, where the target single-stranded nucleic acid is present at a concentration as low as 1 aM, 10 aM, 100 aM, 500 aM, 1 fM, 10 fM, 500 fM, 800 fM, 1 pM, 10 pM, 100 pM, or 1 pM.

[0136] In some embodiments, the target nucleic acid is present in the cleavage reaction at a concentration of about 10 nM, about 20 nM, about 30 nM, about 40 nM, about 50 nM, about 60 nM, about 70 nM, about 80 nM, about 90 nM, about 100 nM, about 200 nM, about 300 nM, about 400 nM, about 500 nM, about 600 nM, about 700 nM, about 800 nM, about 900 nM, about 1 μM, about 10 μM, or about 100 μM. In some embodiments, the target nucleic acid is present in the cleavage reaction at a concentration of from 10 nM to 20 nM, from 20 nM to 30 nM, from 30 nM to 40 nM, from 40 nM to 50 nM, from 50 nM to 60 nM, from 60 nM to 70 nM, from 70 nM to 80 nM, from 80 nM to 90 nM, from 90 nM to 100 nM, from 100 nM to 200 nM, from 200 nM to 300 nM, from 300 nM to 400 nM, from 400 nM to 500 nM, from 500 nM to 600 nM, from 600 nM to 700 nM, from 700 nM to 800 nM, from 800 nM to 900 nM, from 900 nM to 1 μM, from 1 μM to 10 μM, from 10 μM to 100 μM, from 10 nM to 100 nM, from 10 nM to 1 μM, from 10 nM to 10 μM, from 10 nM to 100 μM, from 100 nM to 1 μM, from 100 nM to 10 μM, from 100 nM to 100 μM, or from 1 μM to 100 μM. In some embodiments, the target nucleic acid is present in the cleavage reaction at a concentration of from 20 nM to 50 μM, from 50 nM to 20 μM, or from 200 nM to 5 μM.

[0137] In some cases, the methods, compositions, reagents, enzymes, and kits described herein may be used to detect a target single-stranded nucleic acid in a sample where the sample is contacted with the reagents for a predetermined length of time sufficient for the trans cleavage to occur or cleavage reaction to reach completion. In some cases, the devices, systems, fluidic devices, kits, and methods described herein detect a target single-stranded nucleic acid in a sample where the sample is contacted with the reagents for no greater than 60 minutes. Sometimes the sample is contacted with the reagents for no greater than 120 minutes, 110 minutes, 100 minutes, 90 minutes, 80 minutes, 70 minutes, 60 minutes, 55 minutes, 50 minutes, 45 minutes, 40 minutes, 35 minutes, 30 minutes, 25 minutes, 20 minutes, 15 minutes, 10 minutes, 5 minutes, 4 minutes, 3 minutes, 2 minutes, or 1 minute. Sometimes the sample is contacted with the reagents for at least 120 minutes, 110 minutes, 100 minutes, 90 minutes, 80 minutes, 70 minutes, 60 minutes, 55 minutes, 50 minutes, 45 minutes, 40 minutes, 35 minutes, 30 minutes, 25 minutes, 20 minutes, 15 minutes, 10 minutes, or 5 minutes. In some cases, the sample is contacted with the reagents for from 5 minutes to 120 minutes, from 5 minutes to 100 minutes, from 10 minutes to 90 minutes, from 15 minutes to 45 minutes, or from 20 minutes to 35 minutes. In some cases, the devices, systems, fluidic devices, kits, and methods described herein can detect a target nucleic acid in a sample in less than 10 hours, less than 9 hours, less than 8 hours, less than 7 hours, less than 6 hours, less than 5 hours, less than 4 hours, less than 3 hours, less than 2 hours, less than 1 hour, less than 50 minutes, less than 45 minutes, less than 40 minutes, less than 35 minutes, less than 30 minutes, less than 25 minutes, less than 20 minutes, less than 15 minutes, less than 10 minutes, less than 9 minutes, less than 8 minutes, less than 7 minutes, less than 6 minutes, or less than 5 minutes. In some cases, the devices, systems, fluidic devices, kits, and methods described herein can detect a target nucleic acid in a sample in from 5 minutes to 10 hours, from 10 minutes to 8 hours, from 15 minutes to 6 hours, from 20 minutes to 5 hours, from 30 minutes to 2 hours, or from 45 minutes to 1 hour.

[0138] When an engineered guide nucleic acid binds to a target nucleic acid, the programmable nuclease's trans cleavage activity can be initiated, and detector nucleic acids can be cleaved, resulting in the detection of fluorescence. Some methods as described herein can a method of assaying for a target nucleic acid in a sample comprises contacting the sample to a complex comprising an engineered guide nucleic acid comprising a segment that is reverse complementary to a segment of the target nucleic acid and a programmable nuclease that exhibits sequence independent cleavage upon forming a complex comprising the segment of the engineered guide nucleic acid binding to the segment of the target nucleic acid; and assaying for a signal indicating cleavage of at least some protein-nucleic acids of a population of protein-nucleic acids, wherein the signal indicates a presence of the target nucleic acid in the sample and wherein absence of the signal indicates an absence of the target nucleic acid in the sample. The cleaving of the detector nucleic acid using the programmable nuclease may cleave with an efficiency of 50% as measured by a change in a signal that is calorimetric, potentiometric, amperometric, optical (e.g., fluorescent, colorometric, etc.), or piezo-electric, as non-limiting examples. Some methods as described herein can be a method of detecting a target nucleic acid in a sample comprising contacting the sample comprising the target nucleic acid with an engineered guide nucleic acid targeting a target nucleic acid segment, a programmable nuclease capable of being activated when complexed with the engineered guide nucleic acid and the target nucleic acid segment, a single stranded detector nucleic acid comprising a detection moiety, wherein the detector nucleic acid is capable of being cleaved by the activated programmable nuclease, thereby generating a first detectable signal, cleaving the single stranded detector nucleic acid using the programmable nuclease that cleaves as measured by a change in color, and measuring the first detectable signal on the support medium. The cleaving of the single stranded detector nucleic acid using the programmable nuclease may cleave with an efficiency of 50% as measured by a change in color. In some cases, the cleavage efficiency is at least 40%, 50%, 60%, 70%, 80%, 90%, or 95% as measured by a change in color. The change in color may be a detectable colorimetric signal or a signal visible by eye. The change in color may be measured as a first detectable signal. The first detectable signal can be detectable within 5 minutes of contacting the sample comprising the target nucleic acid with an engineered guide nucleic acid targeting a target nucleic acid segment, a programmable nuclease capable of being activated when complexed with the engineered guide nucleic acid and the target nucleic acid segment, and a single stranded detector nucleic acid comprising a detection moiety, wherein the detector nucleic acid is capable of being cleaved by the activated nuclease. The first detectable signal can be detectable within 1, 2, 3, 4, 5, 6, 7, 8, 9, 10, 11, 12, 13, 14, 15, 20, 25, 30, 35, 40, 45, 50, 55, 60, 70, 80, 90, 100, 110, or 120 minutes of contacting the sample. In some embodiments, the first detectable signal can be detectable within from 1 to 120, from 5 to 100, from 10 to 90, from 15 to 80, from 20 to 60, or from 30 to 45 minutes of contacting the sample.

[0139] In some cases, the methods, reagents, enzymes, and kits described herein detect a target single-stranded nucleic acid with a programmable nuclease and a single-stranded detector nucleic acid in a sample where the sample is contacted with the reagents for a predetermined length of time sufficient for trans cleavage of the single stranded detector nucleic acid. In a preferred embodiment, a Cas13a programmable nuclease us used to detect the presence of a single-stranded DNA target nucleic acid. For example, a programmable nuclease is LbuCas13a that detects a target nucleic acid and a single stranded detector nucleic acid comprises two adjacent uracil nucleotides with a green detectable moiety that is detected upon cleavage. As another example, a programmable nuclease is LbaCas13a that detects a target nucleic acid and a single-stranded detector nucleic acid comprises two adjacent adenine nucleotides with a red detectable moiety that is detected upon cleavage.

### Buffers

[0140] The reagents described herein can also include buffers, which are compatible with the methods, compositions, reagents, enzymes, and kits disclosed herein. These buffers are compatible with the other reagents, samples, and support mediums as described herein for detection of an ailment, such as a disease, cancer, or genetic disorder, or genetic information, such as for phenotyping, genotyping, or determining ancestry. As described herein, nucleic acid sequences comprising DNA may be detected using a DNA-activated programmable RNA nuclease and other reagents disclosed herein. Additionally, detection by a DNA-activated programmable RNA nuclease, which can cleave RNA reporters, allows for multiplexing with other programmable nucleases, such as a DNA-activated programmable DNA nuclease that can cleave DNA reporters (e.g., Type V CRISPR enzyme). The methods described herein can also include the use of buffers, which are compatible with the methods disclosed herein. For example, a buffer comprises 20 mM HEPES pH 6.8, 50 mM KCl, 5 mM MgCl₂, and 5% glycerol. In some instances the buffer comprises from 0 to 100, 0 to 75, 0 to 50, 0 to 25, 0 to 20, 0 to 10, 0 to 5, 5 to 10,5 to 15, 5 to 20, 5 to 25, to 30, 5 to 40, 5 to 50, 5 to 75, 5 to 100, 10 to 20, 10 to 30, 10 to 40, 10 to 50, 15 to 20, 15 to 25, 15 to 30, 15 to 4, 15 to 50, 20 to 25, 20 to 30, 20 to 40, or 20 to 50 mM HEPES pH 6.8. The buffer can comprise to 0 to 500, 0 to 400, 0 to 300, 0 to 250, 0 to 200,0 to 150,0 to 100,0 to 75,0 to 50,0 to 25,0 to 20,0 to 10,0 to 5,5 to 10,5 to 15,5 to 20, 5 to 25, to 30, 5 to 40, 5 to 50, 5 to 75, 5 to 100, 5 to 150, 5 to 200, 5 to 250, 5 to 300, 5 to 400, 5 to 500, 25 to 50, 25 to 75, 25 to 100, 50 to 100, 50 150, 50 to 200, 50 to 250, 50 to 300, 100 to 200, 100 to 250, 100 to 300, or 150 to 250 mM KCl. In other instances the buffer comprises 0 to 100,0 to 75,0 to 50,0 to 25,0 to 20,0 to 10,0 to 5,5 to 10,5 to 15,5 to 20,5 to 25, to 30,5 to 40, 5 to 50, 5 to 75, 5 to 100, 10 to 20, 10 to 30, 10 to 40, 10 to 50, 15 to 20, 15 to 25, 15 to 30, 15 to 4, 15 to 50, 20 to 25, 20 to 30, 20 to 40, or 20 to 50 mM MgCl₂. The buffer can comprise 0 to 25, 0 to 20, 0 to 10, 0 to 5, 5 to 10, 5 to 15, 5 to 20, 5 to 25, 5 to 30% glycerol. The buffer can comprise 0 to 30, 2 to 25, or 10 to 20% glycerol.

[0141] As another example, a buffer comprises 100 mM Imidazole pH 7.5; 250 mM KCl, 25 mM MgCl₂, 50 ug/mL BSA, 0.05% Igepal Ca-630, and 25% Glycerol. In some instances the buffer comprises 0 to 500, 0 to 400, 0 to 300, 0 to 250, 0 to 200, 0 to 150, 0 to 100, 0 to 75, 0 to 50,0 to 25,0 to 20,0 to 10,0 to 5,5 to 10,5 to 15,5 to 20,5 to 25, to 30,5 to 40,5 to 50,5 to 75, 5 to 100, 5 to 150, 5 to 200, 5 to 250, 5 to 300, 5 to 400, 5 to 500, 25 to 50, 25 to 75, 25 to 100, 50 to 100, 50 150, 50 to 200, 50 to 250, 50 to 300, 100 to 200, 100 to 250, 100 to 300, or 150 to 250 mM Imidazole pH 7.5. In some instances the buffer comprises 100 to 250, 100 to 200, or 150 to 200 mM Imdazole pH 7.5. The buffer can comprise 0 to 500, 0 to 400, 0 to 300, 0 to 250, 0 to 200, 0 to 150, 0 to 100, 0 to 75, 0 to 50, 0 to 25, 0 to 20, 0 to 10, 0 to 5, 5 to 10, 5 to 15, 5 to 20, 5 to 25, to 30, 5 to 40, 5 to 50, 5 to 75, 5 to 100, 5 to 150, 5 to 200, 5 to 250, 5 to 300, 5 to 400, 5 to 500, 25 to 50, 25 to 75, 25 to 100, 50 to 100, 50 150, 50 to 200, 50 to 250, 50 to 300, 100 to 200, 100 to 250, 100 to 300, or 150 to 250 mM KCl. In other instances the buffer comprises 0 to 100, 0 to 75, 0 to 50, 0 to 25, 0 to 20, 0 to 10, 0 to 5, 5 to 10, 5 to 15, 5 to 20, 5 to 25, to 30, 5 to 40, 5 to 50, 5 to 75, 5 to 100, 10 to 20, 10 to 30, 10 to 40, 10 to 50, 15 to 20, 15 to 25, 15 to 30, 15 to 4, 15 to 50, 20 to 25, 20 to 30, 20 to 40, or 20 to 50 mM MgCl₂. The buffer, in some instances, comprises 0 to 100, 0 to 75, 0 to 50, 0 to 25, 0 to 20, 0 to 10, 0 to 5, 5 to 50, 5 to 75,5 to 100, 10 to 20, 10 to 50, 10 to 75, 10 to 100,25 to 50,25 to 7525 to 100, 50 to 75, or 50 to 100 ug/mL BSA. In some instances, the buffer comprises 0 to 1, 0 to 0.5, 0 to 0.25, 0 to 0.01, 0 to 0.05, 0 to 0.025, 0 to 0.01, 0.01 to 0.025, 0.01 to 0.05, 0.01 to 0.1, 0.01 to 0.25, 0.01, to 0.5, 0.01 to 1, 0.025 to 0.05, 0.025 to 0.1, 0.025, to 0.5, 0.025 to 1, 0.05 to 0.1, 0.05 to 0.25, 0.05 to 0.5, 0.05 to 0.75, 0.05 to 1, 0.1 to 0.25, 0.1 to 0.5, or 0.1 to 1% Igepal Ca-630. The buffer can comprise 0 to 25, 0 to 20, 0 to 10, 0 to 5, 5 to 10, 5 to 15, 5 to 20, 5 to 25, 5 to 30% glycerol. The buffer can comprise 0 to 30, 2 to 25, or 10 to 20% glycerol.

### Stability

[0142] Present in this disclosure are stable compositions of the reagents and the programmable nuclease system for use in the methods as discussed herein. The reagents and programmable nuclease system described herein may be stable in various storage conditions including refrigerated, ambient, and accelerated conditions. Disclosed herein are stable reagents. The stability may be measured for the reagents and programmable nuclease system themselves or the reagents and programmable nuclease system present on the support medium.

[0143] In some instances, stable as used herein refers to a reagents having about 5% w/w or less total impurities at the end of a given storage period. Stability may be assessed by HPLC or any other known testing method. The stable reagents may have about 10% w/w, about 5% w/w, about 4% w/w, about 30% w/w, about 2% w/w, about 10% w/w, or about 0.50% w/w total impurities at the end of a given storage period. The stable reagents may have from 0.5% w/w to 10% w/w, from 1% w/w to 8% w/w, from 2% w/w to 7% w/w, or from 3% w/w to 5% w/w total impurities at the end of a given storage period.

[0144] In some embodiments, stable as used herein refers to a reagents and programmable nuclease system having about 10% r less loss of detection activity at the end of a given storage period and at a given storage condition. Detection activity can be assessed by known positive sample using a known method. Alternatively or combination, detection activity can be assessed by the sensitivity, accuracy, or specificity. In some embodiments, the stable reagents has about 10%, about 9%, about 8%, about 7%, about 6%, about 5%, about 4%, about 3%, about 2%, about 1%, or about 0.5% loss of detection activity at the end of a given storage period. In some embodiments, the stable reagents has from 0.5% to 10%, from 1% to 8%, from 2% to 7%, or from 3% to 5% loss of detection activity at the end of a given storage period.

[0145] In some embodiments, the stable composition has zero loss of detection activity at the end of a given storage period and at a given storage condition. The given storage condition may comprise humidity of equal to or less than 10%, 20%, 30%, 40%, 50%, 60%, 70%, 80%, 90%, or 100% relative humidity. The controlled storage environment may comprise humidity from 0% to 50% relative humidity, from 0% to 40% relative humidity, from 0% to 30% relative humidity, from 0% to 20% relative humidity, or from 0% to 10% relative humidity. The controlled storage environment may comprise humidity from 10% to 80%, from 10% to 70%, from 10% to 60%, from 20% to 50%, from 20% to 40%, or from 20% to 30% relative humidity. The controlled storage environment may comprise temperatures of about −100° C., about −80° C., about −20° C., about 4° C., about 25° C. (room temperature), or about 40° C. The controlled storage environment may comprise temperatures from −80° C. to 25° C., or from −100° C. to 40° C. The controlled storage environment may comprise temperatures from −20° C. to 40° C., from −20° C. to 4° C., or from 4° C. to 40° C. The controlled storage environment may protect the system or kit from light or from mechanical damage. The controlled storage environment may be sterile or aseptic or maintain the sterility of the light conduit. The controlled storage environment may be aseptic or sterile.

### Multiplexing

[0146] The methods and systems disclosed herein can be carried out for multiplexed detection. These methods of multiplexing are, for example, consistent with fluidic devices disclosed herein for detection of a target nucleic acid sequence within the sample, wherein the fluidic device may comprise multiple pumps, valves, reservoirs, and chambers for sample preparation, amplification of a target nucleic acid sequence within the sample, mixing with a programmable nuclease, and detection of a detectable signal arising from cleavage of detector nucleic acids by the programmable nuclease within the fluidic system itself.

[0147] Methods consistent with the present disclosure include a multiplexing method of assaying for a target nucleic acid in a sample. A multiplexing method comprises contacting the sample to a complex comprising an engineered guide nucleic acid comprising a segment that is reverse complementary to a segment of the target nucleic acid (e.g., DNA) and a programmable nuclease (e.g., a DNA-activated programmable RNA nuclease, such as Cas13) that exhibits sequence independent cleavage upon forming a complex comprising the segment of the engineered guide nucleic acid binding to the target nucleic acid; and assaying for a signal indicating cleavage of at least some protein-nucleic acids of a population of protein-nucleic acids, wherein the signal indicates a presence of the target nucleic acid in the sample and wherein absence of the signal indicates an absence of the target nucleic acid in the sample. As another example, multiplexing method of assaying for a target nucleic acid in a sample, for example, comprises: a) contacting the sample to a complex comprising an engineered guide nucleic acid comprising a segment that is reverse complementary to a segment of the target nucleic acid and a programmable nuclease that exhibits sequence independent cleavage upon forming a complex comprising the segment of the engineered guide nucleic acid binding to the segment of the target nucleic acid; b) contacting the complex to a substrate; c) contacting the substrate to a reagent that differentially reacts with a cleaved substrate; and d) assaying for a signal indicating cleavage of the substrate, wherein the signal indicates a presence of the target nucleic acid in the sample and wherein absence of the signal indicates an absence of the target nucleic acid in the sample. Often, the substrate is an enzyme-nucleic acid. Sometimes, the substrate is an enzyme substrate-nucleic acid.

[0148] Multiplexing can be either spatial multiplexing wherein multiple different target nucleic acids at the same time, but the reactions are spatially separated. Often, the multiple target nucleic acids are detected using the same programmable nuclease, but different engineered guide nucleic acids. The multiple target nucleic acids sometimes are detected using the different programmable nucleases. For example, a DNA-activated programmable RNA nuclease and a DNA-activated programmable DNA nuclease can both be used in a single assay to directly detect DNA targets encoding different sequences. The activated DNA-activated programmable RNA nuclease cleaves an RNA reporter, generating a first detectable signal and the activated DNA-activated programmable DNA nuclease cleaves a DNA reporter, generating a second detectable signal. In some embodiments, the first and second detectable signals are different, and those allow simultaneous detection of more than one target DNA sequences using two programmable nucleases. In some embodiments, the DNA-activated programmable DNA nuclease and the DNA-activated programmable RNA nuclease are complexed to an engineered guide nucleic acid that hybridizes to the same target DNA. The activated DNA-activated programmable RNA nuclease cleaves an RNA reporter, generating a first detectable signal and the activated a DNA-activated programmable DNA nuclease cleaves a DNA reporter, generating a second detectable signal. The first detectable signal and the second detectable signal can be the same, thus, allowing for signal amplification by cleavage of reporters by two different programmable nucleases that are activated by the same target DNA.

[0149] Sometimes, multiplexing can be single reaction multiplexing wherein multiple different target nucleic acids are detected in a single reaction volume. Often, at least two different programmable nucleases are used in single reaction multiplexing. For example, multiplexing can be enabled by immobilization of multiple categories of detector nucleic acids within a fluidic system, to enable detection of multiple target nucleic acids within a single fluidic system. Multiplexing allows for detection of multiple target nucleic acids in one kit or system. In some cases, the multiple target nucleic acids comprise different target nucleic acids to a virus, a bacterium, or a pathogen responsible for one disease. In some cases, the multiple target nucleic acids comprise different target nucleic acids associated with a cancer or genetic disorder. Multiplexing for one disease, cancer, or genetic disorder increases at least one of sensitivity, specificity, or accuracy of the assay to detect the presence of the disease in the sample. In some cases, the multiple target nucleic acids comprise target nucleic acids directed to different viruses, bacteria, or pathogens responsible for more than one disease. In some cases, multiplexing allows for discrimination between multiple target nucleic acids, such as target nucleic acids that comprise different genotypes of the same bacteria or pathogen responsible for a disease, for example, for a wild-type genotype of a bacteria or pathogen and for genotype of a bacteria or pathogen comprising a mutation, such as a single nucleotide polymorphism (SNP) that can confer resistance to a treatment, such as antibiotic treatment. For example, multiplexing comprises method of assaying comprising a single assay for a microorganism species using a first programmable nuclease and an antibiotic resistance pattern in a microorganism using a second programmable nuclease. Sometimes, multiplexing allows for discrimination between multiple target nucleic acids of different HPV strains, for example, HPV16 and HPV18. In some cases, the multiple target nucleic acids comprise target nucleic acids directed to different cancers or genetic disorders. Often, multiplexing allows for discrimination between multiple target nucleic acids, such as target nucleic acids that comprise different genotypes, for example, for a wild-type genotype and for SNP genotype. Multiplexing for multiple diseases, cancers, or genetic disorders provides the capability to test a panel of diseases from a single sample. For example, multiplexing for multiple diseases can be valuable in a broad panel testing of a new patient or in epidemiological surveys. Often multiplexing is used for identifying bacterial pathogens in sepsis or other diseases associated with multiple pathogens.

[0150] Furthermore, signals from multiplexing can be quantified. For example, a method of quantification for a disease panel comprises assaying for a plurality of unique target nucleic acids in a plurality of aliquots from a sample, assaying for a control nucleic acid control in a second aliquot of the sample, and quantifying a plurality of signals of the plurality of unique target nucleic acids by measuring signals produced by cleavage of detector nucleic acids compared to the signal produced in the second aliquot. Often the plurality of unique target nucleic acids are from a plurality of bacterial pathogens in the sample. Sometimes the quantification of a signal of the plurality correlates with a concentration of a unique target nucleic acid of the plurality for the unique target nucleic acid of the plurality that produced the signal of the plurality. The disease panel can be for any communicable disease, such as sepsis.

[0151] In some instances, multiplexed detection detects at least 2 different target nucleic acids in a single reaction. In some instances, multiplexed detection detects at least 3 different target nucleic acids in a single reaction. In some instances, multiplexed detection detects at least 4 different target nucleic acids in a single reaction. In some instances, multiplexed detection detects at least 5 different target nucleic acids in a single reaction. In some cases, multiplexed detection detects at least 6, 7, 8, 9, or 10 different target nucleic acids in a single reaction. In some instances, the multiplexed kits detect at least 2 different target nucleic acids in a single kit. In some instances, the multiplexed kits detect at least 3 different target nucleic acids in a single kit. In some instances, the multiplexed kits detect at least 4 different target nucleic acids in a single kit. In some instances, the multiplexed kits detect at least 5 different target nucleic acids in a single kit. In some instances, the multiplexed kits detect at least 6, 7, 8, 9, or 10 different target nucleic acids in a single kit. In some instances, the multiplexed kits detect from 2 to 10, from 3 to 9, from 4 to 8, or from 5 to 7 different target nucleic acids in a single kit.

### Support Medium

[0152] A number of support mediums are consistent with the compositions and methods disclosed herein. These support mediums are, for example, consistent with fluidic devices disclosed herein for detection of a target nucleic acid within the sample, wherein the fluidic device may comprise multiple pumps, valves, reservoirs, and chambers for sample preparation, amplification of a target nucleic acid within the sample, mixing with a programmable nuclease, and detection of a detectable signal arising from cleavage of detector nucleic acids by the programmable nuclease within the fluidic system itself. These support mediums are compatible with the samples, reagents, and fluidic devices described herein for detection of an ailment, such as a viral infection. A support medium described herein can provide a way to present the results from the activity between the reagents and the sample. The support medium provides a medium to present the detectable signal in a detectable format. Optionally, the support medium concentrates the detectable signal to a detection spot in a detection region to increase the sensitivity, specificity, or accuracy of the assay. The support mediums can present the results of the assay and indicate the presence or absence of the disease of interest targeted by the target nucleic acid. The result on the support medium can be read by eye or using a machine. The support medium helps to stabilize the detectable signal generated by the cleaved detector molecule on the surface of the support medium. In some instances, the support medium is a lateral flow assay strip. In some instances, the support medium is a PCR plate. The PCR plate can have 96 wells or 384 wells. The PCR plate can have a subset number of wells of a 96 well plate or a 384 well plate. A subset number of wells of a 96 well PCR plate is, for example, 1, 2, 3,4, 5,6,7, 8,9, 10, 11, 12, 13, 14, 15, 16, 17, 18, 19, 20, 21, 22, 23, 24, 25, 30, 35, 40, 45, 50, 55, 60, 65, 70, 75, 80, 85, 90, or 95 wells. For example, a PCR subset plate can have 4 wells wherein a well is the size of a well from a 96 well PCR plate (e.g., a 4 well PCR subset plate wherein the wells are the size of a well from a 96 well PCR plate). A subset number of wells of a 384 well PCR plate is, for example, 1, 2, 3, 4, 5, 6, 7, 8, 9, 10, 11, 12, 13, 14, 15, 16, 17, 18, 19, 20, 21, 22, 23, 24, 25, 30, 35, 40, 45, 50, 55, 60, 65, 70, 75, 80, 85, 90, 95, 100, 110, 120, 130, 140, 150, 160, 170, 180, 190, 200, 220, 240, 260, 280, 300, 320, 340, 360, or 380 wells. For example, a PCR subset plate can have 20 wells wherein a well is the size of a well from a 384 well PCR plate (e.g., a 20 well PCR subset plate wherein the wells are the size of a well from a 384 well PCR plate). The PCR plate or PCR subset plate can be paired with a fluorescent light reader, a visible light reader, or other imaging device. Often, the imaging device is a digital camera, such a digital camera on a mobile device. The mobile device may have a software program or a mobile application that can capture an image of the PCR plate or PCR subset plate, identify the assay being performed, detect the individual wells and the sample therein, provide image properties of the individuals wells comprising the assayed sample, analyze the image properties of the contents of the individual wells, and provide a result.

[0153] The support medium has at least one specialized zone or region to present the detectable signal. The regions comprise at least one of a sample pad region, a nucleic acid amplification region, a conjugate pad region, a detection region, and a collection pad region. In some instances, the regions are overlapping completely, overlapping partially, or in series and in contact only at the edges of the regions, where the regions are in fluid communication with its adjacent regions. In some instances, the support medium has a sample pad located upstream of the other regions; a conjugate pad region having a means for specifically labeling the detector moiety; a detection region located downstream from sample pad; and at least one matrix which defines a flow path in fluid connection with the sample pad. In some instances, the support medium has an extended base layer on top of which the various zones or regions are placed. The extended base layer may provide a mechanical support for the zones.

[0154] Described herein are sample pads that provide an area to apply the sample to the support medium. The sample may be applied to the support medium by a dropper or a pipette on top of the sample pad, by pouring or dispensing the sample on top of the sample pad region, or by dipping the sample pad into a reagent chamber holding the sample. The sample can be applied to the sample pad prior to reaction with the reagents when the reagents are placed on the support medium or be reacted with the reagents prior to application on the sample pad. The sample pad region can transfer the reacted reagents and sample into the other zones of the support medium. Transfer of the reacted reagents and sample may be by capillary action, diffusion, convection or active transport aided by a pump. In some cases, the support medium is integrated with or overlayed by microfluidic channels to facilitate the fluid transport.

[0155] The dropper or the pipette may dispense a predetermined volume. In some cases, the predetermined volume may range from about 1 μl to about 1000 μl, about 1 μl to about 500 μl, about 1 μl to about 100 μl, or about 1 μl to about 50 μl. In some cases, the predetermined volume may be at least 1 μl, 2 μl, 3 μl, 4 μl, 5 μl, 6 μl, 7 μl, 8 μl, 9 μl, 10 μl, 25 μl, 50 μl, 75 μl, 100 μl, 250 μl, 500 μl, 750 μl, or 1000 μl. The predetermined volume may be no more than 5 μl, 10 μl, 25 μl, 50 μl, 75 μl, 100 μl, 250 μl, 500 μl, 750 μl, or 1000 μl. The dropper or the pipette may be disposable or be single-use.

[0156] Optionally, a buffer or a fluid may also be applied to the sample pad to help drive the movement of the sample along the support medium. In some cases, the volume of the buffer or the fluid may range from about 1 μl to about 1000 μl, about 1 μl to about 500 μl, about 1 μl to about 100 μl, or about 1 μl to about 50 μl. In some cases, the volume of the buffer or the fluid may be at least 1 μl, 2 μl, 3 μl, 4 μl, 5 μl, 6 μl, 7 μl, 8 μl, 9 μl, 10 μl, 25 μl, 50 μl, 75 μl, 100 μl, 250 μl, 500 μl, 750 μl, or 1000 μl. The volume of the buffer or the fluid may be no more than than 5 μl, 10 μl, 25 μl, 50 μl, 75 μl, 100 μl, 250 μl, 500 μl, 750 μl, or 1000 μl. In some cases, the buffer or fluid may have a ratio of the sample to the buffer or fluid of at least 1:1, 1:2, 1:3, 1:4, 1:5, 1:6, 1:7, 1:8, 1:9, or 1:10.

[0157] The sample pad can be made from various materials that transfer most of the applied reacted reagents and samples to the subsequent regions. The sample pad may comprise cellulose fiber filters, woven meshes, porous plastic membranes, glass fiber filters, aluminum oxide coated membranes, nitrocellulose, paper, polyester filter, or polymer-based matrices. The material for the sample pad region may be hydrophilic and have low non-specific binding. The material for the sample pad may range from about 50 μm to about 1000 μm, about 50 μm to about 750 μm, about 50 μm to about 500 μm, or about 100 μm to about 500 μm.

[0158] The sample pad can be treated with chemicals to improve the presentation of the reaction results on the support medium. The sample pad can be treated to enhance extraction of nucleic acid in the sample, to control the transport of the reacted reagents and sample or the conjugate to other regions of the support medium, or to enhance the binding of the cleaved detection moiety to the conjugate binding molecule on the surface of the conjugate or to the capture molecule in the detection region. The chemicals may comprise detergents, surfactants, buffers, salts, viscosity enhancers, or polypeptides. In some instances, the chemical comprises bovine serum albumin.

[0159] Described herein are conjugate pads that provide a region on the support medium comprising conjugates coated on its surface by conjugate binding molecules that can bind to the detector moiety from the cleaved detector molecule or to the control molecule. The conjugate pad can be made from various materials that facilitate binding of the conjugate binding molecule to the detection moiety from cleaved detector molecule and transfer of most of the conjugate-bound detection moiety to the subsequent regions. The conjugate pad may comprise the same material as the sample pad or other zones or a different material than the sample pad. The conjugate pad may comprise glass fiber filters, porous plastic membranes, aluminum oxide coated membranes, paper, cellulose fiber filters, woven meshes, polyester filter, or polymer-based matrices. The material for the conjugate pad region may be hydrophilic, have low non-specific binding, or have consistent fluid flow properties across the conjugate pad. In some cases, the material for the conjugate pad may range from about 50 μm to about 1000 μm, about 50 μm to about 750 μm, about 50 μm to about 500 μm, or about 100 μm to about 500 μm.

[0160] Further described herein are conjugates that are placed on the conjugate pad and immobilized to the conjugate pad until the sample is applied to the support medium. The conjugates may comprise a nanoparticle, a gold nanoparticle, a latex nanoparticle, a quantum dot, a chemiluminescent nanoparticle, a carbon nanoparticle, a selenium nanoparticle, a fluorescent nanoparticle, a liposome, or a dendrimer. The surface of the conjugate may be coated by a conjugate binding molecule that binds to the detection moiety from the cleaved detector molecule.

### Detection Methods

[0161] Disclosed herein are methods of assaying for a target nucleic acid as described herein wherein a signal is detected. In some embodiments, the methods disclosed herein are methods of assaying for a target deoxyribonucleic acid as described herein using a DNA-activated programmable RNA nuclease wherein a signal is detected. For example, a method of assaying for a target nucleic acid in a sample comprises contacting the sample to a complex comprising an engineered guide nucleic acid comprising a segment that is reverse complementary to a segment of the target nucleic acid and a programmable nuclease that exhibits sequence independent cleavage upon forming a complex comprising the segment of the engineered guide nucleic acid binding to the segment of the target nucleic acid; and assaying for a signal indicating cleavage of at least some protein-nucleic acids of a population of protein-nucleic acids, wherein the signal indicates a presence of the target nucleic acid in the sample and wherein absence of the signal indicates an absence of the target nucleic acid in the sample. As another example, a method of assaying for a target nucleic acid in a sample, for example, comprises: a) contacting the sample to a complex comprising an engineered guide nucleic acid comprising a segment that is reverse complementary to a segment of the target nucleic acid and a DNA-activated programmable RNA nuclease that exhibits sequence independent cleavage upon forming a complex comprising the segment of the engineered guide nucleic acid binding to the segment of the target nucleic acid; b) contacting the complex to a substrate; c) contacting the substrate to a reagent that differentially reacts with a cleaved substrate; and d) assaying for a signal indicating cleavage of the substrate, wherein the signal indicates a presence of the target nucleic acid in the sample and wherein absence of the signal indicates an absence of the target nucleic acid in the sample. Often, the substrate is an enzyme-nucleic acid. Sometimes, the substrate is an enzyme substrate-nucleic acid. As described herein, nucleic acid sequences comprising DNA may be detected using a DNA-activated programmable RNA nuclease and other reagents disclosed herein.

[0162] Present in this disclosure are methods of assaying for a target nucleic acid as described herein. In some embodiments, the method is a method of assaying for a target deoxyribonucleic acid using a DNA-activated programmable RNA nuclease, wherein assaying comprises detecting cleavage of an RNA reporter. For example, a method of assaying for a target nucleic acid in a sample comprises contacting the sample to a complex comprising an engineered guide nucleic acid comprising a segment that is reverse complementary to a segment of the target nucleic acid and a programmable nuclease (e.g., a DNA-activated programmable RNA nuclease) that exhibits sequence independent cleavage upon forming a complex comprising the segment of the engineered guide nucleic acid binding to the segment of the target nucleic acid (e.g. target deoxyribonucleic acid); and assaying for a signal indicating cleavage of at least some protein-nucleic acids of a population of protein-nucleic acids, wherein the signal indicates a presence of the target nucleic acid in the sample and wherein absence of the signal indicates an absence of the target nucleic acid in the sample. As another example, a method of assaying for a target nucleic acid in a sample, for example, comprises: a) contacting the sample to a complex comprising an engineered guide nucleic acid comprising a segment that is reverse complementary to a segment of the target nucleic acid and a programmable nuclease that exhibits sequence independent cleavage upon forming a complex comprising the segment of the engineered guide nucleic acid binding to the segment of the target nucleic acid; b) contacting the complex to a substrate; c) contacting the substrate to a reagent that differentially reacts with a cleaved substrate; and d) assaying for a signal indicating cleavage of the substrate, wherein the signal indicates a presence of the target nucleic acid in the sample and wherein absence of the signal indicates an absence of the target nucleic acid in the sample. Often, the substrate is an enzyme-nucleic acid. Sometimes, the substrate is an enzyme substrate-nucleic acid.

[0163] A number of detection devices and methods are consistent with methods disclosed herein. For example, any device that can measure or detect a calorimetric, potentiometric, amperometric, optical (e.g., fluorescent, colorometric, etc.), or piezo-electric signal. Often a calorimetric signal is heat produced after cleavage of the detector nucleic acids. Sometimes, a calorimetric signal is heat absorbed after cleavage of the detector nucleic acids. A potentiometric signal, for example, is electrical potential produced after cleavage of the detector nucleic acids. An amperometric signal can be movement of electrons produced after the cleavage of detector nucleic acid. Often, the signal is an optical signal, such as a colorometric signal or a fluorescence signal. An optical signal is, for example, a light output produced after the cleavage of the detector nucleic acids. Sometimes, an optical signal is a change in light absorbance between before and after the cleavage of detector nucleic acids. Often, a piezo-electric signal is a change in mass between before and after the cleavage of the detector nucleic acid. Sometimes, the detector nucleic acid is protein-nucleic acid. Often, the protein-nucleic acid is an enzyme-nucleic acid.

[0164] The results from the detection region from a completed assay can be detected and analyzed in various ways. For example, by a glucometer. In some cases, the positive control spot and the detection spot in the detection region is visible by eye, and the results can be read by the user. In some cases, the positive control spot and the detection spot in the detection region is visualized by an imaging device or other device depending on the type of signal. Often, the imaging device is a digital camera, such a digital camera on a mobile device. The mobile device may have a software program or a mobile application that can capture an image of the support medium, identify the assay being performed, detect the detection region and the detection spot, provide image properties of the detection spot, analyze the image properties of the detection spot, and provide a result. Alternatively or in combination, the imaging device can capture fluorescence, ultraviolet (UV), infrared (IR), or visible wavelength signals. The imaging device may have an excitation source to provide the excitation energy and captures the emitted signals. In some cases, the excitation source can be a camera flash and optionally a filter. In some cases, the imaging device is used together with an imaging box that is placed over the support medium to create a dark room to improve imaging. The imaging box can be a cardboard box that the imaging device can fit into before imaging. In some instances, the imaging box has optical lenses, mirrors, filters, or other optical elements to aid in generating a more focused excitation signal or to capture a more focused emission signal. Often, the imaging box and the imaging device are small, handheld, and portable to facilitate the transport and use of the assay in remote or low resource settings.

[0165] The assay described herein can be visualized and analyzed by a mobile application (app) or a software program. Using the graphic user interface (GUI) of the app or program, an individual can take an image of the support medium, including the detection region, barcode, reference color scale, and fiduciary markers on the housing, using a camera on a mobile device. The program or app reads the barcode or identifiable label for the test type, locate the fiduciary marker to orient the sample, and read the detectable signals, compare against the reference color grid, and determine the presence or absence of the target nucleic acid, which indicates the presence of the gene, virus, or the agent responsible for the disease, cancer, or genetic disorder. The mobile application can present the results of the test to the individual. The mobile application can store the test results in the mobile application. The mobile application can communicate with a remote device and transfer the data of the test results. The test results can be viewable remotely from the remote device by another individual, including a healthcare professional. A remote user can access the results and use the information to recommend action for treatment, intervention, clean up of an environment. The methods for detection of a target nucleic acid described herein further can comprises reagents protease treatment of the sample. The sample can be treated with protease, such as Protease K, before amplification or before assaying for a detectable signal. Often, a protease treatment is for no more than 15 minutes. Sometimes, the protease treatment is for no more than 1, 5, 10, 15, 20, 25, 30, or more minutes, or any value from 1 to 30 minutes. Sometimes, the protease treatment is from 1 to 30, from 5 to 25, from 10 to 20, or from 10 to 15 minutes. The kit or system for detection of a target nucleic acid described herein further comprises reagents for nucleic acid amplification of target nucleic acids in the sample. Isothermal nucleic acid amplification allows the use of the kit or system in remote regions or low resource settings without specialized equipment for amplification. Often, the reagents for nucleic acid amplification comprise a recombinase, a oligonucleotide primer, a single-stranded DNA binding (SSB) protein, and a polymerase. Sometimes, nucleic acid amplification of the sample improves at least one of sensitivity, specificity, or accuracy of the assay in detecting the target nucleic acid. In some cases, the nucleic acid amplification is performed in a nucleic acid amplification region on the support medium. Alternatively or in combination, the nucleic acid amplification is performed in a reagent chamber, and the resulting sample is applied to the support medium. Sometimes, the nucleic acid amplification is isothermal nucleic acid amplification. In some cases, the nucleic acid amplification is transcription mediated amplification (TMA). Nucleic acid amplification is helicase dependent amplification (HDA) or circular helicase dependent amplification (cHDA) in other cases. In additional cases, nucleic acid amplification is strand displacement amplification (SDA). In some cases, nucleic acid amplification is by recombinase polymerase amplification (RPA). In some cases, nucleic acid amplification is by at least one of loop mediated amplification (LAMP) or the exponential amplification reaction (EXPAR). Nucleic acid amplification is, in some cases, by rolling circle amplification (RCA), ligase chain reaction (LCR), simple method amplifying RNA targets (SMART), single primer isothermal amplification (SPIA), multiple displacement amplification (MDA), nucleic acid sequence based amplification (NASBA), hinge-initiated primer-dependent amplification of nucleic acids (HIP), nicking enzyme amplification reaction (NEAR), or improved multiple displacement amplification (IMDA). Often, the nucleic acid amplification is performed for no greater than 1, 2, 3, 4, 5, 6, 7, 8, 9, 10, 11, 12, 13, 14, 15, 16, 17, 18, 19, 20, 25, 30, 40, 50, or 60 minutes, or any value from 1 to 60 minutes. Sometimes, the nucleic acid amplification is performed for from 1 to 60, from 5 to 55, from 10 to 50, from 15 to 45, from 20 to 40, or from 25 to 35 minutes. Sometimes, the nucleic acid amplification reaction is performed at a temperature of around 20-45° C. In some cases, the nucleic acid amplification reaction is performed at a temperature no greater than 20° C., 25° C., 30° C., 35° C., 37° C., 40° C., 45° C., or any value from 20° C. to 45° C. In some cases, the nucleic acid amplification reaction is performed at a temperature of at least 20° C., 25° C., 30° C., 35° C., 37° C., 40° C., or 45° C., or any value from 20° C. to 45° C. In some cases, the nucleic acid amplification reaction is performed at a temperature of from 20° C. to 45° C., from 25° C. to 40° C., from 30° C. to 40° C., or from 35° C. to 40° C.

[0166] Sometimes, the total time for the performing the method described herein is no greater than 3 hours, 2 hours, 1 hour, 50 minutes, 40 minutes, 30 minutes, 20 minutes, or any value from 3 hours to 20 minutes. Often, a method of nucleic acid detection from a raw sample comprises protease treating the sample for no more than 15 minutes, amplifying (can also be referred to as pre-amplifying) the sample for no more than 15 minutes, subjecting the sample to a programmable nuclease-mediated detection, and assaying nuclease mediated detection. The total time for performing this method, sometimes, is no greater than 3 hours, 2 hours, 1 hour, 50 minutes, 40 minutes, 30 minutes, 20 minutes, or any value from 3 hours to 20 minutes. Often, the protease treatment is Protease K. Often the amplifying is thermal cycling amplification. Sometimes the amplifying is isothermal amplification.

### Detection/Visualization Devices

[0167] A number of detection or visualization devices and methods are consistent with the methods, compositions, reagents, enzymes, and kits disclosed herein. As described herein, a target nucleic acid comprising DNA may be detected using a DNA-activated programmable RNA nuclease and other reagents disclosed herein. A DNA-activated programmable RNA nuclease may also be multiplexed as described herein. Sometimes, the signal generated for detection is a calorimetric, potentiometric, amperometric, optical (e.g., fluorescent, colorometric, etc.), or piezo-electric signal. Often a calorimetric signal is heat produced after cleavage of the detector nucleic acids. Sometimes, a calorimetric signal is heat absorbed after cleavage of the detector nucleic acids. A potentiometric signal, for example, is electrical potential produced after cleavage of the detector nucleic acids. An amperometric signal can be movement of electrons produced after the cleavage of detector nucleic acid. Often, the signal is an optical signal, such as a colorometric signal or a fluorescence signal. An optical signal is, for example, a light output produced after the cleavage of the detector nucleic acids. Sometimes, an optical signal is a change in light absorbance between before and after the cleavage of detector nucleic acids. Often, a piezo-electric signal is a change in mass between before and after the cleavage of the detector nucleic acid. Sometimes, the detector nucleic acid is protein-nucleic acid. Often, the protein-nucleic acid is an enzyme-nucleic acid. The detection/visualization can be analyzed using various methods, as further described below. The results from the detection region from a completed assay can be visualized and analyzed in various ways. In some cases, the positive control spot and the detection spot in the detection region is visible by eye, and the results can be read by the user. In some cases, the positive control spot and the detection spot in the detection region is visualized by an imaging device. Often, the imaging device is a digital camera, such a digital camera on a mobile device. The mobile device may have a software program or a mobile application that can capture an image of the support medium, identify the assay being performed, detect the detection region and the detection spot, provide image properties of the detection spot, analyze the image properties of the detection spot, and provide a result. Alternatively or in combination, the imaging device can capture fluorescence, ultraviolet (UV), infrared (IR), or visible wavelength signals. The imaging device may have an excitation source to provide the excitation energy and captures the emitted signals. In some cases, the excitation source can be a camera flash and optionally a filter. In some cases, the imaging device is used together with an imaging box that is placed over the support medium to create a dark room to improve imaging. The imaging box can be a cardboard box that the imaging device can fit into before imaging. In some instances, the imaging box has optical lenses, mirrors, filters, or other optical elements to aid in generating a more focused excitation signal or to capture a more focused emission signal. Often, the imaging box and the imaging device are small, handheld, and portable to facilitate the transport and use of the assay in remote or low resource settings.

[0168] The assay described herein can be visualized and analyzed by a mobile application (app) or a software program. Using the graphic user interface (GUI) of the app or program, an individual can take an image of the support medium, including the detection region, barcode, reference color scale, and fiduciary markers on the housing, using a camera on a mobile device. The program or app reads the barcode or identifiable label for the test type, locate the fiduciary marker to orient the sample, and read the detectable signals, compare against the reference color grid, and determine the presence or absence of the target nucleic acid, which indicates the presence of the gene, virus, or the agent responsible for the disease, cancer, or genetic disorder. The mobile application can present the results of the test to the individual. The mobile application can store the test results in the mobile application. The mobile application can communicate with a remote device and transfer the data of the test results. The test results can be viewable remotely from the remote device by another individual, including a healthcare professional. A remote user can access the results and use the information to recommend action for treatment, intervention, clean up of an environment.

[0169] Unless otherwise defined, all technical terms used herein have the same meaning as commonly understood by one of ordinary skill in the art to which this invention belongs. As used in this specification and the appended claims, the singular forms “a,” “an,” and “the” include plural references unless the context clearly dictates otherwise. Any reference to “or” herein is intended to encompass “and/or” unless otherwise stated.

[0170] As used herein, the term “comprising” and its grammatical equivalents specifies the presence of stated features, integers, steps, operations, elements, and/or components, but do not preclude the presence or addition of one or more other features, integers, steps, operations, elements, components, and/or groups thereof. As used herein, the term “and/or” includes any and all combinations of one or more of the associated listed items.

[0171] Unless specifically stated or obvious from context, as used herein, the term “about” in reference to a number or range of numbers is understood to mean the stated number and numbers +/−10% thereof, or 10% below the lower listed limit and 10% above the higher listed limit for the values listed for a range.

[0172] As used herein the terms “individual,” “subject,” and “patient” are used interchangeably and include any member of the animal kingdom, including humans.

[0173] As used herein the term “antibody” refers to, but not limited to, a monoclonal antibody, a synthetic antibody, a polyclonal antibody, a multispecific antibody (including a bi-specific antibody), a human antibody, a humanized antibody, a chimeric antibody, a single-chain Fvs (scFv) (including bi-specific scFvs), a single chain antibody, a Fab fragment, a F(ab′) fragment, a disulfide-linked Fvs (sdFv), or an epitope-binding fragment thereof. In some cases, the antibody is an immunoglobulin molecule or an immunologically active portion of an immunoglobulin molecule. In some instances, an antibody is animal in origin including birds and mammals. Alternately, an antibody is human or a humanized monoclonal antibody.

### Numbered Embodiments

[0174] The following embodiments recite non-limiting permutations of combinations of features disclosed herein. Other permutations of combinations of features are also contemplated. In particular, each of these numbered embodiments is contemplated as depending from or relating to every previous or subsequent numbered embodiment, independent of their order as listed. 1. A composition comprising: a) a DNA-activated programmable RNA nuclease; and b) an engineered guide nucleic acid comprising a first segment that is reverse complementary to a segment of a target deoxyribonucleic acid, wherein the engineered guide nucleic acid comprises a second segment that binds to the DNA-activated programmable RNA nuclease to form a complex. 2. The composition of embodiment 1, further comprising a detector nucleic acid. 3. The composition of embodiment 2, wherein the detector nucleic acid comprises an RNA sequence. 4. The composition of embodiment 3, wherein the detector nucleic acid is an RNA reporter. 5. The composition of any one of embodiments 1-4, wherein the composition further comprises the target deoxyribonucleic acid. 6. The composition of any one of embodiments 1-5, wherein the target deoxyribonucleic acid is an amplicon of a nucleic acid. 7. The composition of embodiment 6, wherein the nucleic acid is a deoxyribonucleic acid or a ribonucleic acid. 8. The composition of any one of embodiments 1-7, wherein the DNA-activated programmable RNA nuclease comprises a HEPN domain. 9. The composition of any one of embodiments 1-8, wherein the DNA-activated programmable RNA nuclease comprises two HEPN domains. 10. The composition of any one of embodiments 1-9, wherein the DNA-activated programmable RNA nuclease is a Type VI CRISPR/Cas enzyme. 11. The composition of any one of embodiments 1-10, wherein the DNA-activated programmable RNA nuclease is a Cas13 protein. 12. The composition of any one of embodiments 1-11, wherein the Cas13 protein comprises a Cas13a polypeptide, a Cas13b polypeptide, a Cas13c polypeptide, a Cas13c polypeptide, a Cas13d polypeptide, or a Cas13e polypeptide. 13. The composition of any one of embodiments 11-12, wherein the Cas13 protein is a Cas13a polypeptide. 14. The composition of embodiment 13, wherein the Cas13a polypeptide is LbuCas13a or LwaCas13a. 15. The composition of any one of embodiments 1-14, wherein the DNA-activated programmable RNA nuclease has at least 80%, at least 85%, at least 90%, at least 92%, at least 95%, at least 97%, or at least 99% sequence identity to any one of SEQ ID NO: 18-SEQ ID NO: 35. 16. The composition of any one of embodiments 1-15, wherein the DNA-activated programmable RNA nuclease is selected from any one of SEQ ID NO: 18-SEQ ID NO: 35. 17. The composition of any one of embodiments 1-16, wherein the composition has a pH from pH 6.8 to pH 8.2. 18. The composition of any one of embodiments 1-17, wherein the target deoxyribonucleic acid lacks a guanine at the 3′ end. 19. The composition of any one of embodiments 1-18, wherein the terminal 3′ nucleotide in the segment of the target deoxyribonucleic acid is A, C or T. 20. The composition of any one of embodiments 1-19, wherein the target deoxyribonucleic acid is a single-stranded deoxyribonucleic acid. 21. The composition of any one of embodiments 1-20, wherein the target deoxyribonucleic acid is single stranded deoxyribonucleic acid oligonucleotides. 22. The composition of any one of embodiments 1-21, wherein the target deoxyribonucleic acid is genomic single stranded deoxyribonucleic acids. 23. The composition of any one of embodiments 1-22, wherein the target deoxyribonucleic acid has a length of from 18 to 100 nucleotides. 24. The composition of any one of embodiments 1-23, wherein the target deoxyribonucleic acid has a length of from 18 to 30 nucleotides. 25. The composition of any one of embodiments 1-24, wherein the target deoxyribonucleic acid has a length of 20 nucleotides. 26. The composition of any one of embodiments 1-26, wherein the composition is present within a support medium. 27. A lateral flow device comprising the composition of any one of embodiments 1-26. 28. A device configured for fluorescence detection comprising the composition of any one of embodiments 1-26. 29. The composition of any one of embodiments 1-26, further comprising a second engineered guide nucleic acid comprising a first segment that is reverse complementary to a segment of a second target deoxyribonucleic acid; and a DNA-activated programmable DNA nuclease, wherein the second engineered guide nucleic acid comprises a second segment that binds to the DNA-activated programmable DNA nuclease to form a complex. 30. The composition of embodiment 29, further comprising a DNA reporter. 31. The composition of any one of embodiments 29-30, wherein the DNA-activated programmable DNA nuclease comprises a RuvC catalytic domain. 32. The composition of any one of embodiments 29-31, wherein the DNA-activated programmable DNA nuclease comprises a type V CRISPR/Cas enzyme. 33. The composition of embodiment 32, wherein the type V CRISPR/Cas enzyme is a Cas12 protein. 34. The composition of embodiment 33, wherein the Cas12 protein comprises a Cas12a polypeptide, a Cas12b polypeptide, a Cas12c polypeptide, a Cas12d polypeptide, a Cas12e polypeptide, a C2c4 polypeptide, a C2c8 polypeptide, a C2c5 polypeptide, a C2c10 polypeptide, and a C2c9 polypeptide. 35. The composition of any one of embodiments 33-34, wherein the Cas12 protein has at least 80%, at least 85%, at least 90%, at least 92%, at least 95%, at least 97%, or at least 99% sequence identity to any one of SEQ ID NO: 36-SEQ ID NO: 46. 36. The composition of any one of embodiments 33-35, wherein the Cas12 protein is selected from SEQ ID NO: 36-SEQ ID NO: 46. 37. The composition of embodiment 32, wherein the type V CRIPSR/Cas enzyme is a Cas14 protein. 38. The composition of embodiment 37, wherein the Cas14 protein comprises a Cas14a polypeptide, a Cas14b polypeptide, a Cas14c polypeptide, a Cas14d polypeptide, a Cas14e polypeptide, a Cas14f polypeptide, a Cas14g polypeptide, a Cas14h polypeptide, a Cas14i polypeptide, a Cas14j polypeptide, or a Cas14k polypeptide. 39. The composition of any one of embodiments 37-38, wherein the Cas14 protein has at least 80%, at least 85%, at least 90%, at least 92%, at least 95%, at least 97%, or at least 99% sequence identity to any one of SEQ ID NO: 47-SEQ ID NO: 138. 40. The composition of any one of embodiments 37-39, wherein the Cas14 protein is selected from SEQ ID NO: 47-SEQ ID NO: 138. 41. The composition of embodiment 32, wherein the type V CRIPSR/Cas enzyme is a CasΦ protein. 42. The composition of embodiment 41, wherein the CasΦ protein has at least 80%, at least 85%, at least 90%, at least 92%, at least 95%, at least 97%, or at least 99% sequence identity to any one of SEQ ID NO: 139-SEQ ID NO: 186. 43. The composition of any one of embodiments 41-42, wherein the CasΦ protein is selected from SEQ ID NO: 139-SEQ ID NO: 186. 44. A method of assaying for a target deoxyribonucleic acid in a sample, the method comprising: contacting the sample to a complex comprising: a DNA-activated programmable RNA nuclease; and an engineered guide nucleic acid comprising a first segment that is reverse complementary to a segment of a target deoxyribonucleic acid and a second segment that binds to the DNA-activated programmable RNA nuclease; and assaying for a signal produced by cleavage of at least some RNA reporters of a plurality of RNA reporters by the DNA-activated programmable RNA nuclease upon hybridization of the first segment of the engineered guide nucleic acid to the segment of the target deoxyribonucleic acid. 45. A method of assaying for a target ribonucleic acid in a sample, the method comprising: amplifying the target ribonucleic acid in a sample to produce a target deoxyribonucleic acid; contacting the target deoxyribonucleic acid to a complex comprising: a DNA-activated programmable RNA nuclease; and an engineered guide nucleic acid comprising a first segment that is reverse complementary to a segment of a target deoxyribonucleic acid and a second segment that binds to the DNA-activated programmable RNA nuclease; and assaying for a signal produced by cleavage of at least some RNA reporters of a plurality of RNA reporters by the DNA-activated programmable RNA nuclease upon hybridization of the first segment of the engineered guide nucleic acid to the segment of the target deoxyribonucleic acid. 46. The method of any one of embodiments 44-45, wherein the DNA-activated programmable RNA nuclease comprises a HEPN domain. 47. The method of any one of embodiments 44-46, wherein the DNA-activated programmable RNA nuclease comprises two HEPN domains. 48. The method of any one of embodiments 44-47, wherein the DNA-activated programmable RNA nuclease is a Type VI CRISPR/Cas enzyme. 49. The method of any one of embodiments 44-48, wherein the DNA-activated programmable RNA nuclease is a Cas13 protein. 50. The method of any embodiment 49, wherein the Cas13 protein comprises a Cas13a polypeptide, a Cas13b polypeptide, a Cas13c polypeptide, a Cas13c polypeptide, a Cas13d polypeptide, or a Cas13e polypeptide. 51. The method of any one of embodiments 49-50, wherein the Cas13 protein is a Cas13a polypeptide. 52. The method of embodiment 51, wherein the Cas13a polypeptide is LbuCas13a or LwaCas13a. 53. The method of any one of embodiments 44-52, wherein the DNA-activated programmable RNA nuclease has at least 80%, at least 85%, at least 90%, at least 92%, at least 95%, at least 97%, or at least 99% sequence identity to any one of SEQ ID NO: 18-SEQ ID NO: 35. 54. The method of any one of embodiments 44-53, wherein the DNA-activated programmable RNA nuclease is selected from any one of SEQ ID NO: 18-SEQ ID NO: 35. 55. The method of any one of embodiments 44-54, wherein cleavage of the at least some RNA reporters of the plurality of reporters occurs from pH 6.8 to pH 8.2. 56. The method of any one of embodiments 44-55, wherein the target deoxyribonucleic acid lacks a guanine at the 3′ end. 57. The method of any one of embodiments 44-56, wherein the terminal 3′ nucleotide in the segment of the target deoxyribonucleic acid is A, C or T. 58. The method of any one of embodiments 44-57, wherein the target deoxyribonucleic acid is a single-stranded deoxyribonucleic acid. 59. The method of any one of embodiments 44-58, wherein the target deoxyribonucleic acid is an amplicon of a ribonucleic acid. 60. The method of any one of embodiments 44-59, wherein the target deoxyribonucleic acid or the ribonucleic acid is from an organism. 61. The method of embodiment 60, wherein the organism is a virus, bacteria, plant, or animal. 62. The method of any one of embodiments 44-61, wherein the target deoxyribonucleic acid is produced by a nucleic acid amplification method. 63. The method of any one of embodiments 44-62, wherein the amplifying comprises isothermal amplification. 64. The method of any one of embodiments 44-62, wherein the amplifying comprises thermal amplification. 65. The method of any one of embodiments 44-64, wherein the amplifying comprises recombinase polymerase amplification (RPA), transcription mediated amplification (TMA), strand displacement amplification (SDA), helicase dependent amplification (HDA), loop mediated amplification (LAMP), rolling circle amplification (RCA), single primer isothermal amplification (SPIA), ligase chain reaction (LCR), simple method amplifying RNA targets (SMART), or improved multiple displacement amplification (IMDA), or nucleic acid sequence-based amplification (NASBA). 66. The method of any one of embodiments 44-65, wherein the amplifying is loop mediated amplification (LAMP). 67. The method of any one of embodiments 44-66, wherein the signal is fluorescence, luminescence, colorimetric, electrochemical, enzymatic, calorimetric, optical, amperometric, or potentiometric. 68. The method of any one of embodiments 44-67, further comprising contacting the sample to a second engineered guide nucleic acid comprising a first segment that is reverse complementary to a segment of a second target deoxyribonucleic acid; and a DNA-activated programmable DNA nuclease, wherein the second engineered guide nucleic acid comprises a second segment that binds to the DNA-activated programmable DNA nuclease to form a complex. 69. The method of embodiment 68, further comprising assaying for a signal produced by cleavage of at least some DNA reporters of a plurality of DNA reporters. 70. The composition of any one of embodiments 1-43 or the method of any one of embodiments 44-69, wherein the engineered guide nucleic acid comprises a crRNA. 71. The composition of any one of embodiments 1-43 or the method of any one of embodiments 44-70, wherein the engineered guide nucleic acid comprises a crRNA and a tracrRNA. 72. The method of any one of embodiments 44-71, wherein the signal is present prior to cleavage of the at least some RNA reporters. 73. The method of any one of embodiments 44-71, wherein the signal is absent prior to cleavage of the at least some RNA reporters. 74. The method of any one of embodiments 44-73, wherein the sample comprises blood, serum, plasma, saliva, urine, mucosal sample, peritoneal sample, cerebrospinal fluid, gastric secretions, nasal secretions, sputum, pharyngeal exudates, urethral or vaginal secretions, an exudate, an effusion, or tissue. 75. The method of any one of embodiments 44-74, wherein the method is carried out on a support medium. 76. The method of any one of embodiments 44-75, wherein the method is carried out on a lateral flow assay device. 77. The method of any one of embodiments 44-76, wherein the method is carried out on a device configured for fluorescence detection. 78. The method of any one of embodiments 68-77, wherein the DNA-activated programmable DNA nuclease comprises a RuvC catalytic domain. 79. The method of any one of embodiments 68-78, wherein the DNA-activated programmable DNA nuclease comprises a type V CRISPR/Cas enzyme. 80. The method of embodiment 79, wherein the type V CRISPR/Cas enzyme is a Cas12 protein. 81. The method of embodiment 80, wherein the Cas12 protein comprises a Cas12a polypeptide, a Cas12b polypeptide, a Cas12c polypeptide, a Cas12d polypeptide, a Cas12e polypeptide, a C2c4 polypeptide, a C2c8 polypeptide, a C2c5 polypeptide, a C2c10 polypeptide, and a C2c9 polypeptide. 82. The method of any one of embodiments 80-81, wherein the Cas12 protein has at least 80%, at least 85%, at least 90%, at least 92%, at least 95%, at least 97%, or at least 99% sequence identity to any one of SEQ ID NO: 36-SEQ ID NO: 46. 83. The method of any one of embodiments 80-82, wherein the Cas12 protein is selected from SEQ ID NO: 36-SEQ ID NO: 46. 84. The method of embodiment 79, wherein the type V CRIPSR/Cas enzyme is a Cas14 protein. 85. The method of embodiment 84, wherein the Cas14 protein comprises a Cas14a polypeptide, a Cas14b polypeptide, a Cas14c polypeptide, a Cas14d polypeptide, a Cas14e polypeptide, a Cas14f polypeptide, a Cas14g polypeptide, a Cas14h polypeptide, a Cas14i polypeptide, a Cas14j polypeptide, or a Cas14k polypeptide. 86. The method of any one of embodiments 84-85, wherein the Cas14 protein has at least 80%, at least 85%, at least 90%, at least 92%, at least 95%, at least 97%, or at least 99% sequence identity to any one of SEQ ID NO: 47-SEQ ID NO: 138. 87. The method of any one of embodiments 84-86, wherein the Cas14 protein is selected from SEQ ID NO: 47-SEQ ID NO: 138. 88. The method of embodiment 79, wherein the type V CRIPSR/Cas enzyme is a CasΦ protein. 89. The method of embodiment 88, wherein the CasΦ protein has at least 80%, at least 85%, at least 90%, at least 92%, at least 95%, at least 97%, or at least 99% sequence identity to any one of SEQ ID NO: 139-SEQ ID NO: 186. 90. The method of any one of embodiments 88-89, wherein the CasΦ protein is selected from SEQ ID NO: 139-SEQ ID NO: 186. 91. The composition of any one of embodiments 1-43 or 70-71, wherein the target deoxyribonucleic acid is a reverse transcribed ribonucleic acid. 92. The method of any one of embodiments 44-90, wherein the amplifying the target ribonucleic acid in a sample to produce a target deoxyribonucleic acid comprises reverse transcribing the target ribonucleic acid in the sample to produce the target deoxyribonucleic acid. 93. The composition of any one of embodiments 1-43, 70-71, or 91, wherein the composition further comprises a reagent for reverse transcription. 94. The composition of any one of embodiments 1-43, 70-71, 91, or 93, wherein the composition further comprises a reagent for amplification. 95. The composition of any one of embodiments 1-43, 70-71, 91, or 93-94, wherein the composition further comprises a reagent for in vitro transcription. 96. The method of any one of embodiments 44-90 or 92, wherein the method comprises contacting the target deoxyribonucleic acid or the target ribonucleic acid with a reagent for reverse transcription. 97. The method of any one of embodiments 44-90, 92, or 96, wherein the method comprises contacting the target deoxyribonucleic acid or the target ribonucleic acid with a reagent for amplification. 98. The method of any one of embodiments 44-90, 92, or 96-97, wherein the method comprises contacting the target deoxyribonucleic acid or the target ribonucleic acid with a reagent for in vitro transcription. 99. The composition or method of any one of embodiments 93-98, wherein the reagent for reverse transcription comprises a reverse transcriptase, an oligonucleotide primer, dNTPs, or any combination thereof. 100. The composition or method of any one of embodiments 93-99, wherein the reagent for amplification comprises a primer, a polymerase, dNTPs, or any combination thereof 101. The composition or method of any one of embodiments 93-100, wherein the reagent for in vitro transcription comprise an RNA polymerase, NTPs, a primer, or any combination thereof 102. A method of assaying for a target deoxyribonucleic acid in a sample, the method comprising: contacting the sample to the composition of any one of embodiments 1-43; and assaying for a signal produced by cleavage of at least some RNA reporters of a plurality of RNA reporters by the DNA-activated programmable RNA nuclease upon hybridization of the first segment of the engineered guide nucleic acid to the segment of the target deoxyribonucleic acid. 103. A method of assaying for a target ribonucleic acid in a sample, the method comprising: amplifying the target ribonucleic acid in a sample to produce a target deoxyribonucleic acid; contacting the target deoxyribonucleic acid to the composition of any one of embodiments 1-43; and assaying for a signal produced by cleavage of at least some RNA reporters of a plurality of RNA reporters by the DNA-activated programmable RNA nuclease upon hybridization of the first segment of the engineered guide nucleic acid to the segment of the target deoxyribonucleic acid. 104. The use of a composition according to any one of embodiments 1-26, 29-43, 70, 71, 90, or 93-95 in a method of assaying for a target deoxyribonucleic acid in a sample. 105. The use of a DNA-activated programmable RNA nuclease in a method of assaying for a target deoxyribonucleic acid in a sample according to any one of embodiments 44, 46-90, or 96-102. 106. The use of a DNA-activated programmable RNA nuclease in a method of assaying for a target ribonucleic acid in a sample according to any one of embodiments 45-90, 96-101, or 103.

### EXAMPLES

[0175] The following examples are illustrative and non-limiting to the scope of the devices, systems, fluidic devices, kits, and methods described herein.

### Example 1

### Cas13a Detection of DNA

[0176] This example describes Cas13a detection of target DNA. Cas13a was used to detect a target RT-LAMP DNA amplicon from Influenza A RNA. FIG. 1A shows a schematic The RT-LAMP reaction was performed at 55° C. for 30 minutes with a starting RNA concentration of 10,000 viral genome copies or 0 viral genome copies, as a control. Two different primer sets showed the same results (FIG. 1B and FIG. 1C). After completion of the RT-LAMP reaction, 1 pL of amplicon was added to a 20 μL Cas13a detection reaction. On-target and off-target crRNAs were used to show specific detection by Cas13a at 37° C. of the RT-LAMP DNA amplicon.

[0177] FIG. 1A shows a schematic of the workflow including providing DNA/RNA, LAMP/RT-LAMP, and Cas13a detection. FIG. 1B shows Cas13a specific detection of target RT-LAMP DNA amplicon with a first primer set as measured by background subtracted fluorescence on the y-axis. On-target crRNA results are shown by the darker bars and off-target crRNA control results are shown in lighter bars. A starting RNA concentration of 10,000 viral genome copies is shown in the left two bars and 0 viral genome copies (negative control) is shown in the right two bars. FIG. 1C shows Cas13a specific detection of target RT-LAMP DNA amplicon with a second primer set as measured by background subtracted fluorescence on the y-axis. On-target crRNA results are shown by the darker bars and off-target crRNA control results are shown in lighter bars. A starting RNA concentration of 10,000 viral genome copies is shown in the left two bars and 0 viral genome copies (negative control) is shown in the right two bars.

[0178] Cas13a recognized target ssDNA and target RNA. FIG. 2A shows a Cas13 detection assay using 2.5 nM RNA, single-stranded DNA (ssDNA), or double-stranded (dsDNA) as target nucleic acids, where detection was measured by fluorescence for each of the target nucleic acids tested. The reaction was performed at 37° C. for 20 minutes with both RNA-FQ (RNA-fluorescence quenched reporter) and DNA-FQ reporter substrates. Results showed that Cas13 initiates trans-cleavage activity for RNA-FQ for both target RNA and target ssDNA. Data was normalized to max fluorescence signal for each reporter substrate. FIG. 2B shows Cas12 detection assay using 2.5 nM RNA, ssDNA, and dsDNA as target nucleic acids, where detection was measured by fluorescence for each of the target nucleic acids tested. Reactions were performed at 37° C. for 20 minutes with both RNA-FQ and DNA-FQ reporter substrates. Results supported the previously established preference for Cas12 for either target ssDNA or target dsDNA and specificity for DNA-FQ. Data was normalized to max fluorescence signal for each reporter substrate. FIG. 2C shows the performance of Cas13 and Cas12 on target RNA, target ssDNA, and target dsDNA at various concentrations, where detection was measured by fluorescence for each of the target nucleic acids tested. Reactions were performed at 37° C. for 90 minutes with both RNA-FQ and DNA-FQ reporter substrates. Data was normalized to max fluorescence signal for each reporter substrate. Results indicated picomolar sensitivity of Cas13 for target ssDNA.

[0179] Cas13a trans-cleavage activity was found to be specific for RNA reporters when targeting target ssDNA. FIG. 3 shows an Lbu-Cas13a (SEQ ID NO: 19) detection assay using 2.5 nM target ssDNA with 170 nM of various reporter substrates, wherein detection was measured by fluorescence for each of the reporter substrates tested. A single RNA-FQ reporter substrate (rep01-FAM-U5) was tested and 13 DNA-FQ reporter substrates were tested. TABLE 6 below shows the sequence of each of the reporters tested.

TABLE 6
Reporter Sequences

| Reporter | |
|---|---|
| ID | Sequence |
| rep01 | /56-FAM/rUrUrUrUrU (SEQ ID NO: l)/ |
| | 3IABkFQ/ |
| rep08 | /56-FAM/AAAAA (SEQ ID NO: 194)/3IABkFQ/ |
| rep09 | /56-FAM/CCCCC (SEQ ID NO: 195)/3IABkFQ/ |
| rep10 | /56-FAM/GGGGG (SEQ ID NO: 196)/3IABkFQ/ |
| rep11 | /56-FAM/TTTTT (SEQ ID NO: 197)/3IABkFQ/ |
| rep12 | /56-FAM/TTATTA (SEQ ID NO: 198)/3IABkFQ/ |
| rep13 | /56-FAM/TTATTATT (SEQ ID NO: 9)/3IABkFQ/ |
| rep14 | /56-FAM/ATTATTATTA (SEQ ID NO: 199)/ |
| | 3IABkFQ/ |
| rep15 | /56-FAM/TTTTTT (SEQ ID NO: 10)/3IABkFQ/ |
| rep16 | /56-FAM/TTTTTTT (SEQ ID NO: 200)/ |
| | 3IABkFQ/ |
| rep17 | /56-FAM/TTTTTTTTTT (SEQ ID NO: 12)/ |
| | 3IABkFQ/ |
| rep18 | /56-FAM/TTTTTTTTTTT (SEQ ID NO: 201)/ |
| | 3IABkFQ/ |
| rep19 | /56-FAM/TTTTTTTTTTTT (SEQ ID NO: 13)/ |
| | 3IABkFQ/ |
| rep30 | /FAM/CCGGCAGCCATAACGCCGTGAATACGTTCTGCCG |
| | G (SEQ ID NO: 202)/BHQl/ |

[0180] Results indicated that Cas13 trans-cleavage was specific for RNA reporters, even when activated by target ssDNA.

[0181] Multiple Cas13 family members detected target ssDNA. FIG. 4A shows the results of Cas13 detection assays for Lbu-Cas13a (SEQ ID NO: 19) and Lwa-Cas13a (SEQ ID NO: 25) using 10 nM of target RNA or no target RNA (shown as 0 nM), where detection was measured by fluorescence resulting from cleavage of reporters over time. Three target RNAs encoding different sequences were evaluated with corresponding gRNAs. Results showed similar detection of all three target nucleic acids for both Cas13 family members. FIG. 4B shows the results of Cas13 detection assays for Lbu-Cas13a (SEQ ID NO: 19) and Lwa-Cas13a (SEQ ID NO: 25) using 10 nM of target ssDNA or no target ssDNA (shown as 0 nM), where detection was measured by fluorescence resulting from cleavage of reporters over time. Three target DNA and their corresponding gRNAs, with the same sequence as the target RNAs, were evaluated. Results showed Cas13 family preferences in target ssDNA recognition, with Lbu-Cas13a (SEQ ID NO: 19) exhibiting faster detection for some target nucleic acids and Lwa-Cas13a (SEQ ID NO: 25) exhibiting faster detection for other targets

[0182] Cas13 detection of target ssDNA was robust at multiple pH values. FIG. 5 shows Lbu-Cas13a (SEQ ID NO: 19) detection assay using 1 nM target RNA (at left) or target ssDNA (at right) in buffers with various pH values ranging from 6.8 to 8.2. Reactions were performed at 37° C. for 20 minutes with RNA-FQ reporter substrates. Results indicated enhanced Cas13 RNA detection at buffers with a higher pH (7.9 to 8.2), whereas Cas13 ssDNA detection was consistent across pH conditions (6.8 to 8.2).

[0183] Cas13 preferences for target ssDNA were found to be distinct from preferences for target RNA. FIG. 6A shows guide RNAs (gRNAs) tiled along a target sequence at 1 nucleotide intervals. FIG. 6B shows Cas13M26 detection assays using 0.1 nM RNA or 2 nM target ssDNA with gRNAs tiled at 1 nucleotide intervals and an off-target gRNA. Guide RNAs were ranked by their position along the sequence of the target nucleic acid. FIG. 6C shows data from FIG. 6B ranked by performance of target ssDNA. Results showed that gRNA performance on target ssDNA did not correlate with the performance of the same gRNAs on RNA. FIG. 6D shows performance of gRNAs for each nucleotide on a 3′ end of a target RNA. Results indicated that there are high performing gRNAs on target RNAs regardless of target nucleotide identity at this position. FIG. 6E shows performance of gRNAs for each nucleotide on a 3′ end of a target ssDNA. Results indicated that a G in the target at this position performed worse than other gRNAs.

[0184] Cas13a detected target DNA generated by nucleic acid amplification methods (PCR, LAMP). FIG. 7A shows Lbu-Cas13a (SEQ ID NO: 19) detection assays using 1 μL of target DNA amplicon from various LAMP isothermal nucleic acid amplification reactions. LAMP conditions tested included 6-primer with both loop-forward (LF) and loop-reverse (LB), asymmetric LAMP with LF only, and asymmetric LAMP with LB only. All tested LAMP reactions generated an Lbu-Cas13a (SEQ ID NO: 19) compatible target DNA. FIG. 7B shows Cas13M26 detection assays using various amounts of PCR reaction as a target DNA. Results indicated that PCR generated enough target ssDNA to enable Cas13 detection.

### Example 2

### Detection of Influenza Using a DNA-Activated Programmable RNA Nuclease

[0185] This example describes detection of an influenza viral infection in a sample using a DNA-activated programmable RNA nuclease, such as Cas13a. A fluid sample, for example saliva, is obtained from an individual who may be at risk for influenza. The RNA in the fluid sample is reverse transcribed into cDNA using a reverse transcriptase enzyme. The reverse transcribed cDNA from the fluid sample is combined with a DNA-activated programmable RNA nuclease, a guide RNA comprising a sequence that is reverse complementary to a target cDNA sequence found in the influenza genome, and an RNA reporter.

[0186] If influenza is present in the fluid sample, the guide RNA binds to the reverse transcribed target cDNA and the DNA-activated programmable RNA nuclease is activated. The activated DNA-activated programmable RNA nuclease cleaves the RNA reporter. Upon cleavage of the RNA reporter, a detectable signal is generated, indicating that the sample is positive for influenza.

### Example 3

### Detection of Dengue Using a DNA-Activated Programmable RNA Nuclease

[0187] This example describes detection of a dengue viral infection in a sample using a DNA-activated programmable nuclease, such as Cas13a. A fluid sample, for example saliva, is obtained from an individual who may be at risk for dengue. The RNA in the fluid sample is reverse transcribed into cDNA using a reverse transcriptase enzyme. The reverse transcribed cDNA from the fluid sample is combined with a DNA-activated programmable RNA nuclease, a guide RNA comprising a sequence that is reverse complementary to a target cDNA sequence found in the dengue genome, and an RNA reporter.

[0188] If dengue is present in the fluid sample, the guide RNA binds to the reverse transcribed target cDNA and the DNA-activated programmable RNA nuclease is activated. The activated DNA-activated programmable RNA nuclease cleaves the RNA reporter. Upon cleavage of the detector RNA, a detectable signal is generated, indicating that the sample is positive for dengue.

### Example 4

### Detection of Multiple Infectious Species Using a DNA-Activated Programmable RNA Nuclease

[0189] This example describes detection of multiple infectious species in a sample using a DNA-activated programmable RNA nuclease, such as Cas13a. A fluid sample, for example saliva, is obtained from an individual who may be at risk for sepsis. The fluid sample is combined with a Cas13 programmable nuclease, multiple guide RNAs comprising sequences that are reverse complementary to target DNA sequence found in the genomes of bacterial and viral species associated with sepsis, and an RNA reporter.

[0190] If sepsis is present in the fluid sample, the guide RNAs binds to one or more of the target DNAs and the DNA-activated programmable RNA nuclease is activated. The activated DNA-activated programmable RNA nuclease cleaves the RNA reporter. Upon cleavage of the RNA reporter, a detectable signal is generated indicating that the sample is positive for sepsis.

### Example 5

### Detection of Streptococcus pyogenes Using a DNA-Activated Programmable RNA Nuclease

[0191] This example describes detection of a strep bacterial infection in a sample using a DNA-activated programmable RNA nuclease, such as Cas13a. A fluid sample, for example saliva, is obtained from an individual who may be at risk for strep. The fluid sample is combined with a DNA-activated programmable RNA nuclease, a guide RNA comprising a sequence that is reverse complementary to a target DNA sequence found in the Streptococcus pyogenes genome, and an RNA reporter.

[0192] If strep is present in the fluid sample, the guide RNA binds to the target DNA and the DNA-activated programmable RNA nuclease is activated. The activated DNA-activated programmable RNA nuclease cleaves the RNA reporter. Upon cleavage of the RNA reporter, a detectable signal is generated, indicating that the sample is positive for strep.

### Example 6

### Detection of Malaria Using a DNA-Activated Programmable RNA Programmable Nuclease

[0193] This example describes detection of a malaria parasitic infection in a sample using a DNA-activated programmable RNA nuclease, such as Cas13a. A fluid sample, for example saliva, is obtained from an individual who may be at risk for malaria. The fluid sample is combined with DNA-activated programmable RNA nuclease, a guide RNA comprising a sequence that is reverse complementary to a target DNA sequence found in the Plasmodium falciparum: genome, and an RNA reporter.

[0194] If malaria is present in the fluid sample, the guide RNA binds to the target DNA and the Cas13 programmable nuclease is activated. The activated DNA-activated programmable RNA nuclease cleaves RNA reporter. Upon cleavage of the RNA reporter, a detectable signal is produced indicating that the sample is positive for malaria.

### Example 7

### Detection of a Viral Infection Using a DNA-Activated Programmable RNA

[0195] This example describes detection of a viral infection in a sample using a DNA-activated programmable RNA nuclease, such as Cas13a. A fluid sample, for example saliva, is obtained from an individual who may be at risk for the viral infection. The fluid sample is combined with a DNA-activated programmable RNA nuclease, a guide RNA comprising a sequence that is reverse complementary to a target DNA sequence found in the viral genome, and an RNA reporter.

[0196] If the virus is present in the fluid sample, the guide RNA binds to the target DNA and the DNA-activated programmable RNA nuclease is activated. The activated DNA-activated programmable RNA nuclease cleaves the RNA reporter. Upon cleavage of the RNA reporter, a detectable signal is produced indicating that the sample is positive for the viral infection.

### Example 8

### Detection of a Cancer-Associated Mutation Using a DNA-Activated Programmable RNA

[0197] This example describes detection of a cancer-associated mutation in a sample using a DNA-activated programmable RNA nuclease, such as Cas13a. For example, the cancer-associated mutation is a mutation in BRCA1 or BRCA2. A fluid sample, for example saliva, is obtained from an individual who may be at risk for breast or ovarian cancer. The fluid sample is combined with a DNA-activated programmable RNA nuclease, a guide RNA comprising a sequence that is reverse complementary to a cancer-associated mutant target DNA sequence, and an RNA reporter.

[0198] If a target DNA comprising the cancer-associated mutation is present in the fluid sample, the guide RNA binds to the target DNA and the DNA-activated programmable RNA nuclease is activated. The activated DNA-activated programmable RNA nuclease cleaves the RNA reporter. Upon cleavage of the RNA reporter, a detectable signal is produced indicating that the sample is positive for the cancer-associated mutation.

### Example 9

### Detection of a Nucleotide Insertion Using a DNA-Activated Programmable RNA

[0199] This example describes detection of a nucleotide insertion in a sample using a DNA-activated programmable RNA nuclease, such as Cas13a. A fluid sample, for example saliva, is obtained from an individual, for example an individual who may be at risk for a disease associated with a nucleotide insertion such as Huntington's disease. The fluid sample is combined with a DNA-activated programmable RNA nuclease, a guide RNA comprising a sequence that is reverse complementary to a DNA sequence encoding the nucleotide insertion, for example a polyQ tract in the huntingtin gene (e.g., reverse complementary to a sequence comprising CAG repeats), and an RNA reporter.

[0200] If a target DNA comprising the nucleotide insertion is present in the fluid sample, the guide RNA binds to the target DNA and the DNA-activated programmable RNA nuclease is activated. The activated DNA-activated programmable RNA nuclease cleaves the RNA reporter. Upon cleavage of the RNA reporter, a detectable signal is produced indicating that the sample is positive for the nucleotide insertion.

### Example 10

### Detection of a Single Nucleotide Polymorphism Using a DNA-Activated Programmable RNA Nuclease

[0201] This example describes detection of a single nucleotide polymorphism in a sample using a DNA-activated programmable RNA nuclease, such as a Cas13a. A fluid sample, for example saliva, is obtained from an individual, for example an individual who may be at risk for a disease associated with a single nucleotide polymorphism such as sickle-cell anemia. The fluid sample is combined with a DNA-activated programmable RNA nuclease, a guide RNA comprising a sequence that is reverse complementary to a DNA sequence encoding the single nucleotide polymorphism, for example a single nucleotide polymorphism associated with sickle-cell anemia, and an RNA reporter.

[0202] If a target DNA comprising the single nucleotide polymorphism is present in the fluid sample, the guide RNA binds to the target DNA and the DNA-activated programmable RNA nuclease is activated. The activated programmable nuclease cleaves the RNA reporter. Upon cleavage of the RNA reporter, a detectable signal is produced indicating that the sample is positive for the single nucleotide polymorphism.

### Example 11

### Effects of gRNA Sequence on ssDNA Detection Using a Cas13 DNA-Activated Programmable RNA Nuclease

[0203] This example describes the effects of gRNA sequence on detection of ssDNA oligonucleotides of equal concentrations using an LbuCas13a DNA-activated programmable RNA nuclease of SEQ ID NO: 19. Assays were run using either 2 nM ssDNA oligonucleotides targeted by various crRNAs or no target (shown as 0 μM). Reactions were carried out at 37° C. for 90 minutes with 170 nM of an RNA-FQ reporter substrate (/5-6FAM/rUrUrUrUrU (SEQ ID NO: 1)/3IABkFQ/). Sequences of the guides used in the assay are shown below in TABLE 7.

TABLE 7
Guide Sequences

| Guide | Sequence |
|---|---|
| R1463 | GCCACCCCAAAAAUGAAGGGGACUAAAACAccgaacgaaccacc |
| | agcaga SEQ ID NO: 188 |
| R1464 | GCCACCCCAAAAAUGAAGGGGACUAAAACAcgaacgaaccaccag |
| | cagaa SEQ ID NO: 189 |
| R1465 | GCCACCCCAAAAAUGAAGGGGACUAAAACAgaacgaaccaccagc |
| | agaag SEQ ID NO: 190 |
| R1488 | GCCACCCCAAAAAUGAAGGGGACUAAAACAaaacagaggugaggc |
| | gguca SEQ ID NO: 191 |
| R1490 | GCCACCCCAAAAAUGAAGGGGACUAAAACAacagaggugaggcgg |
| | ucagu SEQ ID NO: 192 |
| R1491 | GCCACCCCAAAAAUGAAGGGGACUAAAACAcagaggugaggcggu |
| | cagua SEQ ID NO: 193 |

[0204] Results are shown in FIG. 8. FIG. 8A shows results from assays in which ssDNA oligonucleotides were present at 2 nM. FIG. 8B shows results from assays in which no target (shown as 0 μM) was. As shown in FIG. 8A, a detection assay in which the guide corresponding to R1490 was used resulted in rapid high levels of fluorescence, indicative of trans cleavage of the RNA-FQ reporter substrate by the activated DNA-activated programmable RNA nuclease upon hybridization of R1490 to the target ssDNA oligonucleotide. As shown in FIG. 8A, guides that worked best were R1490 and R1491 followed by similar levels of activity observed with R1464, R1465, and R1463.

### Example 12

### Detection of M13mp18 ssDNA Using a Cas13 DNA-Activated Programmable RNA Nuclease

[0205] This example describes detection of ssDNA genome from the bacteriophage M13mp18 using an LbuCas13a DNA-activated programmable RNA nuclease of (SEQ ID NO: 19). Assays were run using either 2 nM of ssDNA from the M13mp18 bacteriophage or no target (shown as 0 pM). Reactions were carried out at 37° C. for 90 minutes with 170 nM of an RNA-FQ reporter substrate (/5-6FAM/rUrUrUrUrU (SEQ ID NO: 1)/3IABkFQ/). Sequences of the guides used in the assay are shown below in TABLE 8.

TABLE 8
Guide Sequences

| Guide | Sequence |
|---|---|
| R1490 | GCCACCCCAAAAAUGAAGGGGACUAAAACAacagaggugaggcg |
| | gucagu SEQ ID NO: 192 |
| R1488 | GCCACCCCAAAAAUGAAGGGGACUAAAACAaaacagaggugagg |
| | cgguca SEQ ID NO: 191 |
| R1491 | GCCACCCCAAAAAUGAAGGGGACUAAAACAcagaggugaggcgg |
| | ucagua SEQ ID NO: 193 |

[0206] Results are shown in FIG. 9. FIG. 9A shows results from assays in which the R1490 guide was used. FIG. 9B shows results from assays in which the R1488 guide was used. FIG. 9C shows results from assays in which the R1491 guide was used. In FIG. 9A-9C, the trace appearing more linear from about 1000 to about 2000 AU of raw fluorescence corresponds to assays with no target ssDNA (shown as 0 μM). In FIG. 9A-9C, the trace appearing more curved corresponds to assays with 2 μM of ssDNA. As demonstrated in FIG. 9, the results indicated that the Cas13a DNA-activated programmable RNA nuclease is able to detect long, genome-sized ssDNA products, and not just short ssDNA oligonucleotides (as shown in EXAMPLE 11).

[0207] While preferred embodiments of the present disclosure have been shown and described herein, it will be obvious to those skilled in the art that such embodiments are provided by way of example only. Numerous variations, changes, and substitutions will now occur to those skilled in the art without departing from the disclosure. It should be understood that various alternatives to the embodiments of the disclosure described herein may be employed in practicing the disclosure. It is intended that the following claims define the scope of the disclosure and that methods and structures within the scope of these claims and their equivalents be covered thereby.

The application's sequence listing, which the Patent Office published only in electronic form, follows.

SEQUENCE LISTING (202 sequences)

SEQ ID NO: 1 - RNA, 5 nt, Artificial Sequence
  Synthetic oligonucleotide
uuuuu

SEQ ID NO: 2 - RNA, 8 nt, Artificial Sequence
  Synthetic oligonucleotide
uuuuuuuu

SEQ ID NO: 3 - RNA, 10 nt, Artificial Sequence
  Synthetic oligonucleotide
uuuuuuuuuu

SEQ ID NO: 4 - DNA, 10 bp, Artificial Sequence
  Synthetic oligonucleotide
ttttuutttt

SEQ ID NO: 5 - DNA, 6 bp, Artificial Sequence
  Synthetic oligonucleotide
ttuutt

SEQ ID NO: 6 - DNA, 6 bp, Artificial Sequence
  Synthetic oligonucleotide
taaugc

SEQ ID NO: 7 - DNA, 6 bp, Artificial Sequence
  Synthetic oligonucleotide
tauggc

SEQ ID NO: 8 - RNA, 5 nt, Artificial Sequence
  Synthetic oligonucleotide
uuuuu

SEQ ID NO: 9 - DNA, 8 bp, Artificial Sequence
  Synthetic oligonucleotide
ttattatt

SEQ ID NO: 10 - DNA, 6 bp, Artificial Sequence
  Synthetic oligonucleotide
tttttt

SEQ ID NO: 11 - DNA, 8 bp, Artificial Sequence
  Synthetic oligonucleotide
tttttttt

SEQ ID NO: 12 - DNA, 10 bp, Artificial Sequence
  Synthetic oligonucleotide
tttttttttt

SEQ ID NO: 13 - DNA, 12 bp, Artificial Sequence
  Synthetic oligonucleotide
tttttttttttt

SEQ ID NO: 14 - DNA, 14 bp, Artificial Sequence
  Synthetic oligonucleotide
tttttttttttttt

SEQ ID NO: 15 - DNA, 6 bp, Artificial Sequence
  Synthetic oligonucleotide
aaaaaa

SEQ ID NO: 16 - DNA, 6 bp, Artificial Sequence
  Synthetic oligonucleotide
cccccc

SEQ ID NO: 17 - DNA, 6 bp, Artificial Sequence
  Synthetic oligonucleotide
gggggg

SEQ ID NO: 18 - protein, 1120 aa, Listeria seeligeri
MWISIKTLIHHLGVLFFCDYMYNRREKKIIEVKTMRITKVEVDRKKVLISRDKNGGKLVYENEMQDNTEQIMHHKKSSFYKSVVNKTICRPEQKQMKKLVHGLLQENSQEKIKVSDVTKLNISNFLNHRFKKSLYYFPENSPDKSEEYRIEINLSQLLEDSLKKQQGTFICWESFSKDMELYINWAENYISSKTKLIKKSIRNNRIQSTESRSGQLMDRYMKDILNKNKPFDIQSVSEKYQLEKLTSALKATFKEAKKNDKEINYKLKSTLQNHERQIIEELKENSELNQFNIEIRKHLETYFPIKKTNRKVGDIRNLEIGEIQKIVNHRLKNKIVQRILQEGKLASYEIESTVNSNSLQKIKIEEAFALKFINACLFASNNLRNMVYPVCKKDILMIGEFKNSFKEIKHKKFIRQWSQFFSQEITVDDIELASWGLRGAIAPIRNEIIHLKKHSWKKFFNNPTFKVKKSKIINGKTKDVTSEFLYKETLFKDYFYSELDSVPELIINKMESSKILDYYSSDQLNQVFTIPNFELSLLTSAVPFAPSFKRVYLKGFDYQNQDEAQPDYNLKLNIYNEKAFNSEAFQAQYSLFKMVYYQVFLPQFTTNNDLFKSSVDFILTLNKERKGYAKAFQDIRKMNKDEKPSEYMSYIQSQLMLYQKKQEEKEKINHFEKFINQVFIKGFNSFIEKNRLTYICHPTKNTVPENDNIEIPFHTDMDDSNIAFWLMCKLLDAKQLSELRNEMIKFSCSLQSTEEISTFTKAREVIGLALLNGEKGCNDWKELFDDKEAWKKNMSLYVSEELLQSLPYTQEDGQTPVINRSIDLVKKYGTETILEKLFSSSDDYKVSAKDIAKLHEYDVTEKIAQQESLHKQWIEKPGLARDSAWTKKYQNVINDISNYQWAKTKVELTQVRHLHQLTIDLLSRLAGYMSIADRDFQFSSNYILERENSEYRVTSWILLSENKNKNKYNDYELYNLKNASIKVSSKNDPQLKVDLKQLRLTLEYLELFDNRLKEKRNNISHFNYLNGQLGNSILELFDDARDVLSYDRKLKNAVSKSLKEILSSHGMEVTFKPLYQTNHHLKIDKLQPKKIHHLGEKSTVSSNQVSNEYCQLVRTLLTMK

SEQ ID NO: 19 - protein, 1159 aa, Leptotrichia buccalis
MKVTKVGGISHKKYTSEGRLVKSESEENRTDERLSALLNMRLDMYIKNPSSTETKENQKRIGKLKKFFSNKMVYLKDNTLSLKNGKKENIDREYSETDILESDVRDKKNFAVLKKIYLNENVNSEELEVFRNDIKKKLNKINSLKYSFEKNKANYQKINENNIEKVEGKSKRNIIYDYYRESAKRDAYVSNVKEAFDKLYKEEDIAKLVLEIENLTKLEKYKIREFYHEIIGRKNDKENFAKIIYEEIQNVNNMKELIEKVPDMSELKKSQVFYKYYLDKEELNDKNIKYAFCHFVEIEMSQLLKNYVYKRLSNISNDKIKRIFEYQNLKKLIENKLLNKLDTYVRNCGKYNYYLQDGEIATSDFIARNRQNEAFLRNIIGVSSVAYFSLRNILETENENDITGRMRGKTVKNNKGEEKYVSGEVDKIYNENKKNEVKENLKMFYSYDFNMDNKNEIEDFFANIDEAISSIRHGIVHFNLELEGKDIFAFKNIAPSEISKKMFQNEINEKKLKLKIFRQLNSANVFRYLEKYKILNYLKRTRFEFVNKNIPFVPSFTKLYSRIDDLKNSLGIYWKTPKTNDDNKTKEIIDAQIYLLKNIYYGEFLNYFMSNNGNFFEISKEIIELNKNDKRNLKTGFYKLQKFEDIQEKIPKEYLANIQSLYMINAGNQDEEEKDTYIDFIQKIFLKGFMTYLANNGRLSLIYIGSDEETNTSLAEKKQEFDKFLKKYEQNNNIKIPYEINEFLREIKLGNILKYTERLNMFYLILKLLNHKELTNLKGSLEKYQSANKEEAFSDQLELINLLNLDNNRVTEDFELEADEIGKFLDFNGNKVKDNKELKKFDTNKIYFDGENIIKHRAFYNIKKYGMLNLLEKIADKAGYKISIEELKKYSNKKNEIEKNHKMQENLHRKYARPRKDEKFTDEDYESYKQAIENIEEYTHLKNKVEFNELNLLQGLLLRILHRLVGYTSIWERDLRFRLKGEFPENQYIEEIFNFENKKNVKYKGGQIVEKYIKFYKELHQNDEVKINKYSSANIKVLKQEKKDLYIRNYIAHFNYIPHAEISLLEVLENLRKLLSYDRKLKNAVMKSVVDILKEYGFVATFKIGADKKIGIQTLESEKIVHLKNLKKKKLMTDRNSEELCKLVKIMFEYKMEEKKSEN

SEQ ID NO: 20 - protein, 1389 aa, Leptotrichia shahii
MGNLFGHKRWYEVRDKKDFKIKRKVKVKRNYDGNKYILNINENNNKEKIDNNKFIRKYINYKKNDNILKEFTRKFHAGNILFKLKGKEGIIRIENNDDFLETEEVVLYIEAYGKSEKLKALGITKKKIIDEAIRQGITKDDKKIEIKRQENEEEIEIDIRDEYTNKTLNDCSIILRIIENDELETKKSIYEIFKNINMSLYKIIEKIIENETEKVFENRYYEEHLREKLLKDDKIDVILTNFMEIREKIKSNLEILGFVKFYLNVGGDKKKSKNKKMLVEKILNINVDLTVEDIADFVIKELEFWNITKRIEKVKKVNNEFLEKRRNRTYIKSYVLLDKHEKFKIERENKKDKIVKFFVENIKNNSIKEKIEKILAEFKIDELIKKLEKELKKGNCDTEIFGIFKKHYKVNFDSKKFSKKSDEEKELYKIIYRYLKGRIEKILVNEQKVRLKKMEKIEIEKILNESILSEKILKRVKQYTLEHIMYLGKLRHNDIDMTTVNTDDFSRLHAKEELDLELITFFASTNMELNKIFSRENINNDENIDFFGGDREKNYVLDKKILNSKIKIIRDLDFIDNKNNITNNFIRKFTKIGTNERNRILHAISKERDLQGTQDDYNKVINIIQNLKISDEEVSKALNLDVVFKDKKNIITKINDIKISEENNNDIKYLPSFSKVLPEILNLYRNNPKNEPFDTIETEKIVLNALIYVNKELYKKLILEDDLEENESKNIFLQELKKTLGNIDEIDENIIENYYKNAQISASKGNNKAIKKYQKKVIECYIGYLRKNYEELFDFSDFKMNIQEIKKQIKDINDNKTYERITVKTSDKTIVINDDFEYIISIFALLNSNAVINKIRNRFFATSVWLNTSEYQNIIDILDEIMQLNTLRNECITENWNLNLEEFIQKMKEIEKDFDDFKIQTKKEIFNNYYEDIKNNILTEFKDDINGCDVLEKKLEKIVIFDDETKFEIDKKSNILQDEQRKLSNINKKDLKKKVDQYIKDKDQEIKSKILCRIIFNSDFLKKYKKEIDNLIEDMESENENKFQEIYYPKERKNELYIYKKNLFLNIGNPNFDKIYGLISNDIKMADAKFLFNIDGKNIRKNKISEIDAILKNLNDKLNGYSKEYKEKYIKKLKENDDFFAKNIQNKNYKSFEKDYNRVSEYKKIRDLVEFNYLNKIESYLIDINWKLAIQMARFERDMHYIVNGLRELGIIKLSGYNTGISRAYPKRNGSDGFYTTTAYYKFFDEESYKKFEKICYGFGIDLSENSEINKPENESIRNYISHFYIVRNPFADYSIAEQIDRVSNLLSYSTRYNNSTYASVFEVFKKDVNLDYDELKKKFKLIGNNDILERLMKPKKVSVLELESYNSDYIKNLIIELLTKIENTNDTL

SEQ ID NO: 21 - protein, 1285 aa, Rhodobacter capsulatus
MQIGKVQGRTISEFGDPAGGLKRKISTDGKNRKELPAHLSSDPKALIGQWISGIDKIYRKPDSRKSDGKAIHSPTPSKMQFDARDDLGEAFWKLVSEAGLAQDSDYDQFKRRLHPYGDKFQPADSGAKLKFEADPPEPQAFHGRWYGAMSKRGNDAKELAAALYEHLHVDEKRIDGQPKRNPKTDKFAPGLVVARALGIESSVLPRGMARLARNWGEEEIQTYFVVDVAASVKEVAKAAVSAAQAFDPPRQVSGRSLSPKVGFALAEHLERVTGSKRCSFDPAAGPSVLALHDEVKKTYKRLCARGKNAARAFPADKTELLALMRHTHENRVRNQMVRMGRVSEYRGQQAGDLAQSHYWTSAGQTEIKESEIFVRLWVGAFALAGRSMKAWIDPMGKIVNTEKNDRDLTAAVNIRQVISNKEMVAEAMARRGIYFGETPELDRLGAEGNEGFVFALLRYLRGCRNQTFHLGARAGFLKEIRKELEKTRWGKAKEAEHVVLTDKTVAAIRAIIDNDAKALGARLLADLSGAFVAHYASKEHFSTLYSEIVKAVKDAPEVSSGLPRLKLLLKRADGVRGYVHGLRDTRKHAFATKLPPPPAPRELDDPATKARYIALLRLYDGPFRAYASGITGTALAGPAARAKEAATALAQSVNVTKAYSDVMEGRSSRLRPPNDGETLREYLSALTGETATEFRVQIGYESDSENARKQAEFIENYRRDMLAFMFEDYIRAKGFDWILKIEPGATAMTRAPVLPEPIDTRGQYEHWQAALYLVMHFVPASDVSNLLHQLRKWEALQGKYELVQDGDATDQADARREALDLVKRFRDVLVLFLKTGEARFEGRAAPFDLKPFRALFANPATFDRLFMATPTTARPAEDDPEGDGASEPELRVARTLRGLRQIARYNHMAVLSDLFAKHKVRDEEVARLAEIEDETQEKSQIVAAQELRTDLHDKVMKCHPKTISPEERQSYAAAIKTIEEHRFLVGRVYLGDHLRLHRLMMDVIGRLIDYAGAYERDTGTFLINASKQLGAGADWAVTIAGAANTDARTQTRKDLAHFNVLDRADGTPDLTALVNRAREMMAYDRKRKNAVPRSILDMLARLGLTLKWQMKDHLLQDATITQAAIKHLDKVRLTVGGPAAVTEARFSQDYLQMVAAVFNGSVQNPKPRRRDDGDAWHKPPKPATAQSQPDQKPPNKAPSAGSRLPPPQVGEVYEGVVVKVIDTGSLGFLAVEGVAGNIGLHISRLRRIREDAIIVGRRYRFRVEIYVPPKSNTSKLNAADLVRID

SEQ ID NO: 22 - protein, 1175 aa, Carnobacterium gallinarum
MRITKVKIKLDNKLYQVTMQKEEKYGTLKLNEESRKSTAEILRLKKASFNKSFHSKTINSQKENKNATIKKNGDYISQIFEKLVGVDTNKNIRKPKMSLTDLKDLPKKDLALFIKRKFKNDDIVEIKNLDLISLFYNALQKVPGEHFTDESWADFCQEMMPYREYKNKFIERKIILLANSIEQNKGFSINPETFSKRKRVLHQWAIEVQERGDFSILDEKLSKLAEIYNFKKMCKRVQDELNDLEKSMKKGKNPEKEKEAYKKQKNFKIKTIWKDYPYKTHIGLIEKIKENEELNQFNIEIGKYFEHYFPIKKERCTEDEPYYLNSETIATTVNYQLKNALISYLMQIGKYKQFGLENQVLDSKKLQEIGIYEGFQTKFMDACVFATSSLKNIIEPMRSGDILGKREFKEAIATSSFVNYHHFFPYFPFELKGMKDRESELIPFGEQTEAKQMQNIWALRGSVQQIRNEIFHSFDKNQKFNLPQLDKSNFEFDASENSTGKSQSYIETDYKFLFEAEKNQLEQFFIERIKSSGALEYYPLKSLEKLFAKKEMKFSLGSQVVAFAPSYKKLVKKGHSYQTATEGTANYLGLSYYNRYELKEESFQAQYYLLKLIYQYVFLPNFSQGNSPAFRETVKAILRINKDEARKKMKKNKKFLRKYAFEQVREMEFKETPDQYMSYLQSEMREEKVRKAEKNDKGFEKNITMNFEKLLMQIFVKGFDVFLTTFAGKELLLSSEEKVIKETEISLSKKINEREKTLKASIQVEHQLVATNSAISYWLFCKLLDSRHLNELRNEMIKFKQSRIKFNHTQHAELIQNLLPIVELTILSNDYDEKNDSQNVDVSAYFEDKSLYETAPYVQTDDRTRVSFRPILKLEKYHTKSLIEALLKDNPQFRVAATDIQEWMHKREEIGELVEKRKNLHTEWAEGQQTLGAEKREEYRDYCKKIDRFNWKANKVTLTYLSQLHYLITDLLGRMVGFSALFERDLVYFSRSFSELGGETYHISDYKNLSGVLRLNAEVKPIKIKNIKVIDNEENPYKGNEPEVKPFLDRLHAYLENVIGIKAVHGKIRNQTAHLSVLQLELSMIESMNNLRDLMAYDRKLKNAVTKSMIKILDKHGMILKLKIDENHKNFEIESLIPKEIIHLKDKAIKTNQVSEEYCQLVLALLTTNPGNQLN

SEQ ID NO: 23 - protein, 1285 aa, Herbinix hemicellulosilytica
MKLTRRRISGNSVDQKITAAFYRDMSQGLLYYDSEDNDCTDKVIESMDFERSWRGRILKNGEDDKNPFYMFVKGLVGSNDKIVCEPIDVDSDPDNLDILINKNLTGFGRNLKAPDSNDTLENLIRKIQAGIPEEEVLPELKKIKEMIQKDIVNRKEQLLKSIKNNRIPFSLEGSKLVPSTKKMKWLFKLIDVPNKTFNEKMLEKYWEIYDYDKLKANITNRLDKTDKKARSISRAVSEELREYHKNLRTNYNRFVSGDRPAAGLDNGGSAKYNPDKEEFLLFLKEVEQYFKKYFPVKSKHSNKSKDKSLVDKYKNYCSYKVVKKEVNRSIINQLVAGLIQQGKLLYYFYYNDTWQEDFLNSYGLSYIQVEEAFKKSVMTSLSWGINRLTSFFIDDSNTVKFDDITTKKAKEAIESNYFNKLRTCSRMQDHFKEKLAFFYPVYVKDKKDRPDDDIENLIVLVKNAIESVSYLRNRTFHFKESSLLELLKELDDKNSGQNKIDYSVAAEFIKRDIENLYDVFREQIRSLGIAEYYKADMISDCFKTCGLEFALYSPKNSLMPAFKNVYKRGANLNKAYIRDKGPKETGDQGQNSYKALEEYRELTWYIEVKNNDQSYNAYKNLLQLIYYHAFLPEVRENEALITDFINRTKEWNRKETEERLNTKNNKKHKNFDENDDITVNTYRYESIPDYQGESLDDYLKVLQRKQMARAKEVNEKEEGNNNYIQFIRDVVVWAFGAYLENKLKNYKNELQPPLSKENIGLNDTLKELFPEEKVKSPFNIKCRFSISTFIDNKGKSTDNTSAEAVKTDGKEDEKDKKNIKRKDLLCFYLFLRLLDENEICKLQHQFIKYRCSLKERRFPGNRTKLEKETELLAELEELMELVRFTMPSIPEISAKAESGYDTMIKKYFKDFIEKKVFKNPKTSNLYYHSDSKTPVTRKYMALLMRSAPLHLYKDIFKGYYLITKKECLEYIKLSNIIKDYQNSLNELHEQLERIKLKSEKQNGKDSLYLDKKDFYKVKEYVENLEQVARYKHLQHKINFESLYRIFRIHVDIAARMVGYTQDWERDMHFLFKALVYNGVLEERRFEAIFNNNDDNNDGRIVKKIQNNLNNKNRELVSMLCWNKKLNKNEFGAIIWKRNPIAHLNHFTQTEQNSKSSLESLINSLRILLAYDRKRQNAVTKTINDLLLNDYHIRIKWEGRVDEGQIYFNIKEKEDIENEPIIHLKHLHKKDCYIYKNSYMFDKQKEWICNGIKEEVYDKSILKCIGNLFKFDYEDKNKSSANPKHT

SEQ ID NO: 24 - protein, 1154 aa, Paludibacter propionicigenes
MRVSKVKVKDGGKDKMVLVHRKTTGAQLVYSGQPVSNETSNILPEKKRQSFDLSTLNKTIIKFDTAKKQKLNVDQYKIVEKIFKYPKQELPKQIKAEEILPFLNHKFQEPVKYWKNGKEESFNLTLLIVEAVQAQDKRKLQPYYDWKTWYIQTKSDLLKKSIENNRIDLTENLSKRKKALLAWETEFTASGSIDLTHYHKVYMTDVLCKMLQDVKPLTDDKGKINTNAYHRGLKKALQNHQPAIFGTREVPNEANRADNQLSIYHLEVVKYLEHYFPIKTSKRRNTADDIAHYLKAQTLKTTIEKQLVNAIRANIIQQGKTNHHELKADTTSNDLIRIKTNEAFVLNLTGTCAFAANNIRNMVDNEQTNDILGKGDFIKSLLKDNTNSQLYSFFFGEGLSTNKAEKETQLWGIRGAVQQIRNNVNHYKKDALKTVFNISNFENPTITDPKQQTNYADTIYKARFINELEKIPEAFAQQLKTGGAVSYYTIENLKSLLTTFQFSLCRSTIPFAPGFKKVFNGGINYQNAKQDESFYELMLEQYLRKENFAEESYNARYFMLKLIYNNLFLPGFTTDRKAFADSVGFVQMQNKKQAEKVNPRKKEAYAFEAVRPMTAADSIADYMAYVQSELMQEQNKKEEKVAEETRINFEKFVLQVFIKGFDSFLRAKEFDFVQMPQPQLTATASNQQKADKLNQLEASITADCKLTPQYAKADDATHIAFYVFCKLLDAAHLSNLRNELIKFRESVNEFKFHHLLEIIEICLLSADVVPTDYRDLYSSEADCLARLRPFIEQGADITNWSDLFVQSDKHSPVIHANIELSVKYGTTKLLEQIINKDTQFKTTEANFTAWNTAQKSIEQLIKQREDHHEQWVKAKNADDKEKQERKREKSNFAQKFIEKHGDDYLDICDYINTYNWLDNKMHFVHLNRLHGLTIELLGRMAGFVALFDRDFQFFDEQQIADEFKLHGFVNLHSIDKKLNEVPTKKIKEIYDIRNKIIQINGNKINESVRANLIQFISSKRNYYNNAFLHVSNDEIKEKQMYDIRNHIAHFNYLTKDAADFSLIDLINELRELLHYDRKLKNAVSKAFIDLFDKHGMILKLKLNADHKLKVESLEPKKIYHLGSSAKDKPEYQYCTNQVMMAYCNMCRSLLEMKK

SEQ ID NO: 25 - protein, 1182 aa, Leptotrichia wadei
MYMKITKIDGVSHYKKQDKGILKKKWKDLDERKQREKIEARYNKQIESKIYKEFFRLKNKKRIEKEEDQNIKSLYFFIKELYLNEKNEEWELKNINLEILDDKERVIKGYKFKEDVYFFKEGYKEYYLRILFNNLIEKVQNENREKVRKNKEFLDLKEIFKKYKNRKIDLLLKSINNNKINLEYKKENVNEEIYGINPTNDREMTFYELLKEIIEKKDEQKSILEEKLDNFDITNFLENIEKIFNEETEINIIKGKVLNELREYIKEKEENNSDNKLKQIYNLELKKYIENNFSYKKQKSKSKNGKNDYLYLNFLKKIMFIEEVDEKKEINKEKFKNKINSNFKNLFVQHILDYGKLLYYKENDEYIKNTGQLETKDLEYIKTKETLIRKMAVLVSFAANSYYNLFGRVSGDILGTEVVKSSKTNVIKVGSHIFKEKMLNYFFDFEIFDANKIVEILESISYSIYNVRNGVGHFNKLILGKYKKKDINTNKRIEEDLNNNEEIKGYFIKKRGEIERKVKEKFLSNNLQYYYSKEKIENYFEVYEFEILKRKIPFAPNFKRIIKKGEDLFNNKNNKKYEYFKNFDKNSAEEKKEFLKTRNFLLKELYYNNFYKEFLSKKEEFEKIVLEVKEEKKSRGNINNKKSGVSFQSIDDYDTKINISDYIASIHKKEMERVEKYNEEKQKDTAKYIRDFVEEIFLTGFINYLEKDKRLHFLKEEFSILCNNNNNVVDFNININEEKIKEFLKENDSKTLNLYLFFNMIDSKRISEFRNELVKYKQFTKKRLDEEKEFLGIKIELYETLIEFVILTREKLDTKKSEEIDAWLVDKLYVKDSNEYKEYEEILKLFVDEKILSSKEAPYYATDNKTPILLSNFEKTRKYGTQSFLSEIQSNYKYSKVEKENIEDYNKKEEIEQKKKSNIEKLQDLKVELHKKWEQNKITEKEIEKYNNTTRKINEYNYLKNKEELQNVYLLHEMLSDLLARNVAFFNKWERDFKFIVIAIKQFLRENDKEKVNEFLNPPDNSKGKKVYFSVSKYKNTVENIDGIHKNFMNLIFLNNKFMNRKIDKMNCAIWVYFRNYIAHFLHLHTKNEKISLISQMNLLIKLFSYDKKVQNHILKSTKTLLEKYNIQINFEISNDKNEVFKYKIKNRLYSKKGKMLGKNNKFEILENEFLENVKAMLEYSE

SEQ ID NO: 26 - protein, 1224 aa, Bergeyella zoohelcum
MENKTSLGNNIYYNPFKPQDKSYFAGYFNAAMENTDSVFRELGKRLKGKEYTSENFFDAIFKENISLVEYERYVKLLSDYFPMARLLDKKEVPIKERKENFKKNFKGIIKAVRDLRNFYTHKEHGEVEITDEIFGVLDEMLKSTVLTVKKKKVKTDKTKEILKKSIEKQLDILCQKKLEYLRDTARKIEEKRRNQRERGEKELVAPFKYSDKRDDLIAAIYNDAFDVYIDKKKDSLKESSKAKYNTKSDPQQEEGDLKIPISKNGVVFLLSLFLTKQEIHAFKSKIAGFKATVIDEATVSEATVSHGKNSICFMATHEIFSHLAYKKLKRKVRTAEINYGEAENAEQLSVYAKETLMMQMLDELSKVPDVVYQNLSEDVQKTFIEDWNEYLKENNGDVGTMEEEQVIHPVIRKRYEDKFNYFAIRFLDEFAQFPTLRFQVHLGNYLHDSRPKENLISDRRIKEKITVFGRLSELEHKKALFIKNTETNEDREHYWEIFPNPNYDFPKENISVNDKDFPIAGSILDREKQPVAGKIGIKVKLLNQQYVSEVDKAVKAHQLKQRKASKPSIQNIIEEIVPINESNPKEAIVFGGQPTAYLSMNDIHSILYEFFDKWEKKKEKLEKKGEKELRKEIGKELEKKIVGKIQAQIQQIIDKDTNAKILKPYQDGNSTAIDKEKLIKDLKQEQNILQKLKDEQTVREKEYNDFIAYQDKNREINKVRDRNHKQYLKDNLKRKYPEAPARKEVLYYREKGKVAVWLANDIKRFMPTDFKNEWKGEQHSLLQKSLAYYEQCKEELKNLLPEKVFQHLPFKLGGYFQQKYLYQFYTCYLDKRLEYISGLVQQAENFKSENKVFKKVENECFKFLKKQNYTHKELDARVQSILGYPIFLERGFMDEKPTIIKGKTFKGNEALFADWFRYYKEYQNFQTFYDTENYPLVELEKKQADRKRKTKIYQQKKNDVFTLLMAKHIFKSVFKQDSIDQFSLEDLYQSREERLGNQERARQTGERNTNYIWNKTVDLKLCDGKITVENVKLKNVGDFIKYEYDQRVQAFLKYEENIEWQAFLIKESKEEENYPYVVEREIEQYEKVRREELLKEVHLIEEYILEKVKDKEILKKGDNQNFKYYILNGLLKQLKNEDVESYKVFNLNTEPEDVNINQLKQEATDLEQKAFVLTYIRNKFAHNQLPKKEFWDYCQEKYGKIEKEKTYAEYFAEVFKKEKEALIK

SEQ ID NO: 27 - protein, 1126 aa, Prevotella intermedia
MEDDKKTTDSIRYELKDKHFWAAFLNLARHNVYITVNHINKILEEGEINRDGYETTLKNTWNEIKDINKKDRLSKLIIKHFPFLEAATYRLNPTDTTKQKEEKQAEAQSLESLRKSFFVFIYKLRDLRNHYSHYKHSKSLERPKFEEGLLEKMYNIFNASIRLVKEDYQYNKDINPDEDFKHLDRTEEEFNYYFTKDNEGNITESGLLFFVSLFLEKKDAIWMQQKLRGFKDNRENKKKMTNEVFCRSRMLLPKLRLQSTQTQDWILLDMLNELIRCPKSLYERLREEDREKFRVPIEIADEDYDAEQEPFKNTLVRHQDRFPYFALRYFDYNEIFTNLRFQIDLGTYHFSIYKKQIGDYKESHHLTHKLYGFERIQEFTKQNRPDEWRKFVKTFNSFETSKEPYIPETTPHYHLENQKIGIRFRNDNDKIWPSLKTNSEKNEKSKYKLDKSFQAEAFLSVHELLPMMFYYLLLKTENTDNDNEIETKKKENKNDKQEKHKIEEIIENKITEIYALYDTFANGEIKSIDELEEYCKGKDIEIGHLPKQMIAILKDEHKVMATEAERKQEEMLVDVQKSLESLDNQINEEIENVERKNSSLKSGKIASWLVNDMMRFQPVQKDNEGKPLNNSKANSTEYQLLQRTLAFFGSEHERLAPYFKQTKLIESSNPHPFLKDTEWEKCNNILSFYRSYLEAKKNFLESLKPEDWEKNQYFLKLKEPKTKPKTLVQGWKNGFNLPRGIFTEPIRKWFMKHRENITVAELKRVGLVAKVIPLFFSEEYKDSVQPFYNYHFNVGNINKPDEKNFLNCEERRELLRKKKDEFKKMTDKEKEENPSYLEFKSWNKFERELRLVRNQDIVTWLLCMELFNKKKIKELNVEKIYLKNINTNTTKKEKNTEEKNGEEKNIKEKNNILNRIMPMRLPIKVYGRENFSKNKKKKIRRNTFFTVYIEEKGTKLLKQGNFKALERDRRLGGLFSFVKTPSKAESKSNTISKLRVEYELGEYQKARIEIIKDMLALEKTLIDKYNSLDTDNFNKMLTDWLELKGEPDKASFQNDVDLLIAVRNAFSHNQYPMRNRIAFANINPFSLSSANTSEEKGLGIANQLKDKTHKTIEKIIEIEKPIETKE

SEQ ID NO: 28 - protein, 1127 aa, Prevotella buccae
MQKQDKLFVDRKKNAIFAFPKYITIMENKEKPEPIYYELTDKHFWAAFLNLARHNVYTTINHINRRLEIAELKDDGYMMGIKGSWNEQAKKLDKKVRLRDLIMKHFPFLEAAAYEMTNSKSPNNKEQREKEQSEALSLNNLKNVLFIFLEKLQVLRNYYSHYKYSEESPKPIFETSLLKNMYKVFDANVRLVKRDYMHHENIDMQRDFTHLNRKKQVGRTKNIIDSPNFHYHFADKEGNMTIAGLLFFVSLFLDKKDAIWMQKKLKGFKDGRNLREQMTNEVFCRSRISLPKLKLENVQTKDWMQLDMLNELVRCPKSLYERLREKDRESFKVPFDIFSDDYNAEEEPFKNTLVRHQDRFPYFVLRYFDLNEIFEQLRFQIDLGTYHFSIYNKRIGDEDEVRHLTHHLYGFARIQDFAPQNQPEEWRKLVKDLDHFETSQEPYISKTAPHYHLENEKIGIKFCSAHNNLFPSLQTDKTCNGRSKFNLGTQFTAEAFLSVHELLPMMFYYLLLTKDYSRKESADKVEGIIRKEISNIYAIYDAFANNEINSIADLTRRLQNTNILQGHLPKQMISILKGRQKDMGKEAERKIGEMIDDTQRRLDLLCKQTNQKIRIGKRNAGLLKSGKIADWLVNDMMRFQPVQKDQNNIPINNSKANSTEYRMLQRALALFGSENFRLKAYFNQMNLVGNDNPHPFLAETQWEHQTNILSFYRNYLEARKKYLKGLKPQNWKQYQHFLILKVQKTNRNTLVTGWKNSFNLPRGIFTQPIREWFEKHNNSKRIYDQILSFDRVGFVAKAIPLYFAEEYKDNVQPFYDYPFNIGNRLKPKKRQFLDKKERVELWQKNKELFKNYPSEKKKTDLAYLDFLSWKKFERELRLIKNQDIVTWLMFKELFNMATVEGLKIGEIHLRDIDTNTANEESNNILNRIMPMKLPVKTYETDNKGNILKERPLATFYIEETETKVLKQGNFKALVKDRRLNGLFSFAETTDLNLEEHPISKLSVDLELIKYQTTRISIFEMTLGLEKKLIDKYSTLPTDSFRNMLERWLQCKANRPELKNYVNSLIAVRNAFSHNQYPMYDATLFAEVKKFTLFPSVDTKKIELNIAPQLLEIVGKAIKEIEKSENKN

SEQ ID NO: 29 - protein, 1135 aa, Porphyromonas gingivalis
MNTVPASENKGQSRTVEDDPQYFGLYLNLARENLIEVESHVRIKFGKKKLNEESLKQSLLCDHLLSVDRWTKVYGHSRRYLPFLHYFDPDSQIEKDHDSKTGVDPDSAQRLIRELYSLLDFLRNDFSHNRLDGTTFEHLEVSPDISSFITGTYSLACGRAQSRFAVFFKPDDFVLAKNRKEQLISVADGKECLTVSGFAFFICLFLDREQASGMLSRIRGFKRTDENWARAVHETFCDLCIRHPHDRLESSNTKEALLLDMLNELNRCPRILYDMLPEEERAQFLPALDENSMNNLSENSLDEESRLLWDGSSDWAEALTKRIRHQDRFPYLMLRFIEEMDLLKGIRFRVDLGEIELDSYSKKVGRNGEYDRTITDHALAFGKLSDFQNEEEVSRMISGEASYPVRFSLFAPRYAIYDNKIGYCHTSDPVYPKSKTGEKRALSNPQSMGFISVHDLRKLLLMELLCEGSFSRMQSDFLRKANRILDETAEGKLQFSALFPEMRHRFIPPQNPKSKDRREKAETTLEKYKQEIKGRKDKLNSQLLSAFDMDQRQLPSRLLDEWMNIRPASHSVKLRTYVKQLNEDCRLRLRKFRKDGDGKARAIPLVGEMATFLSQDIVRMIISEETKKLITSAYYNEMQRSLAQYAGEENRRQFRAIVAELRLLDPSSGHPFLSATMETAHRYTEGFYKCYLEKKREWLAKIFYRPEQDENTKRRISVFFVPDGEARKLLPLLIRRRMKEQNDLQDWIRNKQAHPIDLPSHLFDSKVMELLKVKDGKKKWNEAFKDWWSTKYPDGMQPFYGLRRELNIHGKSVSYIPSDGKKFADCYTHLMEKTVRDKKRELRTAGKPVPPDLAADIKRSFHRAVNEREFMLRLVQEDDRLMLMAINKMMTDREEDILPGLKNIDSILDEENQFSLAVHAKVLEKEGEGGDNSLSLVPATIEIKSKRKDWSKYIRYRYDRRVPGLMSHFPEHKATLDEVKTLLGEYDRCRIKIFDWAFALEGAIMSDRDLKPYLHESSSREGKSGEHSTLVKMLVEKKGCLTPDESQYLILIRNKAAHNQFPCAAEMPLIYRDVSAKVGSIEGSSAKDLPEGSSLVDSLWKKYEMIIRKILPILDPENRFFGKLLNNMSQPINDL

SEQ ID NO: 30 - protein, 1115 aa, Bacteroides pyogenes
MESIKNSQKSTGKTLQKDPPYFGLYLNMALLNVRKVENHIRKWLGDVALLPEKSGFHSLLTTDNLSSAKWTRFYYKSRKFLPFLEMFDSDKKSYENRRETAECLDTIDRQKISSLLKEVYGKLQDIRNAFSHYHIDDQSVKHTALIISSEMHRFIENAYSFALQKTRARFTGVFVETDFLQAEEKGDNKKFFAIGGNEGIKLKDNALIFLICLFLDREEAFKFLSRATGFKSTKEKGFLAVRETFCALCCRQPHERLLSVNPREALLMDMLNELNRCPDILFEMLDEKDQKSFLPLLGEEEQAHILENSLNDELCEAIDDPFEMIASLSKRVRYKNRFPYLMLRYIEEKNLLPFIRFRIDLGCLELASYPKKMGEENNYERSVTDHAMAFGRLTDFHNEDAVLQQITKGITDEVRFSLYAPRYAIYNNKIGFVRTSGSDKISFPTLKKKGGEGHCVAYTLQNTKSFGFISIYDLRKILLLSFLDKDKAKNIVSGLLEQCEKHWKDLSENLFDAIRTELQKEFPVPLIRYTLPRSKGGKLVSSKLADKQEKYESEFERRKEKLTEILSEKDFDLSQIPRRMIDEWLNVLPTSREKKLKGYVETLKLDCRERLRVFEKREKGEHPLPPRIGEMATDLAKDIIRMVIDQGVKQRITSAYYSEIQRCLAQYAGDDNRRHLDSIIRELRLKDTKNGHPFLGKVLRPGLGHTEKLYQRYFEEKKEWLEATFYPAASPKRVPRFVNPPTGKQKELPLIIRNLMKERPEWRDWKQRKNSHPIDLPSQLFENEICRLLKDKIGKEPSGKLKWNEMFKLYWDKEFPNGMQRFYRCKRRVEVFDKVVEYEYSEEGGNYKKYYEALIDEVVRQKISSSKEKSKLQVEDLTLSVRRVFKRAINEKEYQLRLLCEDDRLLFMAVRDLYDWKEAQLDLDKIDNMLGEPVSVSQVIQLEGGQPDAVIKAECKLKDVSKLMRYCYDGRVKGLMPYFANHEATQEQVEMELRHYEDHRRRVFNWVFALEKSVLKNEKLRRFYEESQGGCEHRRCIDALRKASLVSEEEYEFLVHIRNKSAHNQFPDLEIGKLPPNVTSGFCECIWSKYKAIICRIIPFIDPERRFFGKLLEQK

SEQ ID NO: 31 - protein, 668 aa, Artificial Sequence
  Synthetic polypeptide
MTEKKSIIFKNKSSVEIVKKDIFSQTPDNMIRNYKITLKISEKNPRVVEAEIEDLMNSTILKDGRRSARREKSMTERKLIEEKVAENYSLLANCPMEEVDSIKIYKIKRFLTYRSNMLLYFASINSFLCEGIKGKDNETEEIWHLKDNDVRKEKVKENFKNKLIQSTENYNSSLKNQIEEKEKLLRKESKKGAFYRTIIKKLQQERIKELSEKSLTEDCEKIIKLYSELRHPLMHYDYQYFENLFENKENSELTKNLNLDIFKSLPLVRKMKLNNKVNYLEDNDTLFVLQKTKKAKTLYQIYDALCEQKNGFNKFINDFFVSDGEENTVFKQIINEKFQSEMEFLEKRISESEKKNEKLKKKFDSMKAHFHNINSEDTKEAYFWDIHSSSNYKTKYNERKNLVNEYTELLGSSKEKKLLREEITQINRKLLKLKQEMEEITKKNSLFRLEYKMKIAFGFLFCEFDGNISKFKDEFDASNQEKIIQYHKNGEKYLTYFLKEEEKEKFNLEKMQKIIQKTEEEDWLLPETKNNLFKFYLLTYLLLPYELKGDFLGFVKKHYYDIKNVDFMDENQNNIQVSQTVEKQEDYFYHKIRLFEKNTKKYEIVKYSIVPNEKLKQYFEDLGIDIKYLTGSVESGEKWLGENLGIDIKYLTVEQKSEVSEEKIKKFL

SEQ ID NO: 32 - protein, 796 aa, Artificial Sequence
  Synthetic polypeptide
MEKDKKGEKIDISQEMIEEDLRKILILFSRLRHSMVHYDYEFYQALYSGKDFVISDKNNLENRMISQLLDLNIFKELSKVKLIKDKAISNYLDKNTTIHVLGQDIKAIRLLDIYRDICGSKNGFNKFINTMITISGEEDREYKEKVIEHFNKKMENLSTYLEKLEKQDNAKRNNKRVYNLLKQKLIEQQKLKEWFGGPYVYDIHSSKRYKELYIERKKLVDRHSKLFEEGLDEKNKKELTKINDELSKLNSEMKEMTKLNSKYRLQYKLQLAFGFILEEFDLNIDTFINNFDKDKDLIISNFMKKRDIYLNRVLDRGDNRLKNIIKEYKFRDTEDIFCNDRDNNLVKLYILMYILLPVEIRGDFLGFVKKNYYDMKHVDFIDKKDKEDKDTFFHDLRLFEKNIRKLEITDYSLSSGFLSKEHKVDIEKKINDFINRNGAMKLPEDITIEEFNKSLILPIMKNYQINFKLLNDIEISALFKIAKDRSITFKQAIDEIKNEDIKKNSKKNDKNNHKDKNINFTQLMKRALHEKIPYKAGMYQIRNNISHIDMEQLYIDPLNSYMNSNKNNITISEQIEKIIDVCVTGGVTGKELNNNIINDYYMKKEKLVFNLKLRKQNDIVSIESQEKNKREEFVFKKYGLDYKDGEINIIEVIQKVNSLQEELRNIKETSKEKLKNKETLFRDISLINGTIRKNINFKIKEMVLDIVRMDEIRHINIHIYYKGENYTRSNIIKFKYAIDGENKKYYLKQHEINDINLELKDKFVTLICNMDKHPNKNKQTINLESNYIQNVKFIIP

SEQ ID NO: 33 - protein, 897 aa, Artificial Sequence
  Synthetic polypeptide
MENKGNNKKIDFDENYNILVAQIKEYFTKEIENYNNRIDNIIDKKELLKYSEKKEESEKNKKLEELNKLKSQKLKILTDEEIKADVIKIIKIFSDLRHSLMHYEYKYFENLFENKKNEELAELLNLNLFKNLTLLRQMKIENKTNYLEGREEFNIIGKNIKAKEVLGHYNLLAEQKNGFNNFINSFFVQDGTENLEFKKLIDEHFVNAKKRLERNIKKSKKLEKELEKMEQHYQRLNCAYVWDIHTSTTYKKLYNKRKSLIEEYNKQINEIKDKEVITAINVELLRIKKEMEEITKSNSLFRLKYKMQIAYAFLEIEFGGNIAKFKDEFDCSKMEEVQKYLKKGVKYLKYYKDKEAQKNYEFPFEEIFENKDTHNEEWLENTSENNLFKFYILTYLLLPMEFKGDFLGVVKKHYYDIKNVDFTDESEKELSQVQLDKMIGDSFFHKIRLFEKNTKRYEIIKYSILTSDEIKRYFRLLELDVPYFEYEKGTDEIGIFNKNIILTIFKYYQIIFRLYNDLEIHGLFNISSDLDKILRDLKSYGNKNINFREFLYVIKQNNNSSTEEEYRKIWENLEAKYLRLHLLTPEKEEIKTKTKEELEKLNEISNLRNGICHLNYKEIIEEILKTEISEKNKEATLNEKIRKVINFIKENELDKVELGFNFINDFFMKKEQFMFGQIKQVKEGNSDSITTERERKEKNNKKLKETYELNCDNLSEFYETSNNLRERANSSSLLEDSAFLKKIGLYKVKNNKVNSKVKDEEKRIENIKRKLLKDSSDIMGMYKAEVVKKLKEKLILIFKHDEEKRIYVTVYDTSKAVPENISKEILVKRNNSKEEYFFEDNNKKYVTEYYTLEITETNELKVIPAKKLEGKEFKTEKNKENKLMLNNHYCFNVKIIY

SEQ ID NO: 34 - protein, 919 aa, Artificial Sequence
  Synthetic polypeptide
MEEIKHKKNKSSIIRVIVSNYDMTGIKEIKVLYQKQGGVDTFNLKTIINLESGNLEIISCKPKEREKYRYEFNCKTEINTISITKKDKVLKKEIRKYSLELYFKNEKKDTVVAKVTDLLKAPDKIEGERNHLRKLSSSTERKLLSKTLCKNYSEISKTPIEEIDSIKIYKIKRFLNYRSNFLIYFALINDFLCAGVKEDDINEVWLIQDKEHTAFLENRIEKITDYIFDKLSKDIENKKNQFEKRIKKYKTSLEELKTETLEKNKTFYIDSIKTKITNLENKITELSLYNSKESLKEDLIKIISIFTNLRHSLMHYDYKSFENLFENIENEELKNLLDLNLFKSIRMSDEFKTKNRTNYLDGTESFTIVKKHQNLKKLYTYYNNLCDKKNGFNTFINSFFVTDGIENTDFKNLIILHFEKEMEEYKKSIEYYKIKISNEKNKSKKEKLKEKIDLLQSELINMREHKNLLKQIYFFDIHNSIKYKELYSERKNLIEQYNLQINGVKDVTAINHINTKLLSLKNKMDKITKQNSLYRLKYKLKIAYSFLMIEFDGDVSKFKNNFDPTNLEKRVEYLDKKEEYLNYTAPKNKFNFAKLEEELQKIQSTSEMGADYLNVSPENNLFKFYILTYIMLPVEFKGDFLGFVKNHYYNIKNVDFMDESLLDENEVDSNKLNEKIENLKDSSFFNKIRLFEKNIKKYEIVKYSVSTQENMKEYFKQLNLDIPYLDYKSTDEIGIFNKNMILPIFKYYQNVFKLCNDIEIHALLALANKKQQNLEYAIYCCSKKNSLNYNELLKTFNRKTYQNLSFIRNKIAHLNYKELFSDLFNNELDLNTKVRCLIEFSQNNKFDQIDLGMNFINDYYMKKTRFIFNQRRLRDLNVPSKEKIIDGKRKQQNDSNNELLKKYGLSRTNIKDIFNKAWY

SEQ ID NO: 35 - protein, 1110 aa, Artificial Sequence
  Synthetic polypeptide
MKVRYRKQAQLDTFIIKTEIVNNDIFIKSIIEKAREKYRYSFLFDGEEKYHFKNKSSVEIVKNDIFSQTPDNMIRNYKITLKISEKNPRVVEAEIEDLMNSTILKDGRRSARREKSMTERKLIEEKVAENYSLLANCPIEEVDSIKIYKIKRFLTYRSNMLLYFASINSFLCEGIKGKDNETEEIWHLKDNDVRKEKVKENFKNKLIQSTENYNSSLKNQIEEKEKLSSKEFKKGAFYRTIIKKLQQERIKELSEKSLTEDCEKIIKLYSELRHPLMHYDYQYFENLFENKENSELTKNLNLDIFKSLPLVRKMKLNNKVNYLEDNDTLFVLQKTKKAKTLYQIYDALCEQKNGFNKFINDFFVSDGEENTVFKQIINEKFQSEMEFLEKRISESEKKNEKLKKKLDSMKAHFRNINSEDTKEAYFWDIHSSRNYKTKYNERKNLVNEYTKLLGSSKEKKLLREEITKINRQLLKLKQEMEEITKKNSLFRLEYKMKIAFGFLFCEFDGNISKFKDEFDASNQEKIIQYHKNGEKYLTSFLKEEEKEKFNLEKMQKIIQKTEEEDWLLPETKNNLFKFYLLTYLLLPYELKGDFLGFVKKHYYDIKNVDFMDENQNNIQVSQTVEKQEDYFYHKIRLFEKNTKKYEIVKYSIVPNEKLKQYFEDLGIDIKYLTGSVESGEKWLGENLGIDIKYLTVEQKSEVSEEKNKKVSLKNNGMFNKTILLFVFKYYQIAFKLFNDIELYSLFFLREKSEKPFEVFLEELKDKMIGKQLNFGQLLYVVYEVLVKNKDLDKILSKKIDYRKDKSFSPEIAYLRNFLSHLNYSKFLDNFMKINTNKSDENKEVLIPSIKIQKMIQFIEKCNLQNQIDFDFNFVNDFYMRKEKMFFIQLKQIFPDINSTEKQKKSEKEEILRKRYHLINKKNEQIKDEHEAQSQLYEKILSLQKIFSCDKNNFYRRLKEEKLLFLEKQGKKKISMKEIKDKIASDISDLLGILKKEITRDIKDKLTEKFRYCEEKLLNISFYNHQDKKKEEGIRVFLIRDKNSDNFKFESILDDGSNKIFISKNGKEITIQCCDKVLETLMIEKNTLKISSNGKIISLIPHYSYSIDVKY

SEQ ID NO: 36 - protein, 1228 aa, Unknown
  Lachnospiraceae bacterium
MSKLEKFTNCYSLSKTLRFKAIPVGKTQENIDNKRLLVEDEKRAEDYKGVKKLLDRYYLSFINDVLHSIKLKNLNNYISLFRKKTRTEKENKELENLEINLRKEIAKAFKGNEGYKSLFKKDIIETILPEFLDDKDEIALVNSFNGFTTAFTGFFDNRENMFSEEAKSTSIAFRCINENLTRYISNMDIFEKVDAIFDKHEVQEIKEKILNSDYDVEDFFEGEFFNFVLTQEGIDVYNAIIGGFVTESGEKIKGLNEYINLYNQKTKQKLPKFKPLYKQVLSDRESLSFYGEGYTSDEEVLEVFRNTLNKNSEIFSSIKKLEKLFKNFDEYSSAGIFVKNGPAISTISKDIFGEWNVIRDKWNAEYDDIHLKKKAVVTEKYEDDRRKSFKKIGSFSLEQLQEYADADLSVVEKLKEIIIQKVDEIYKVYGSSEKLFDADFVLEKSLKKNDAVVAIMKDLLDSVKSFENYIKAFFGEGKETNRDESFYGDFVLAYDILLKVDHIYDAIRNYVTQKPYSKDKFKLYFQNPQFMGGWDKDKETDYRATILRYGSKYYLAIMDKKYAKCLQKIDKDDVNGNYEKINYKLLPGPNKMLPKVFFSKKWMAYYNPSEDIQKIYKNGTFKKGDMFNLNDCHKLIDFFKDSISRYPKWSNAYDFNFSETEKYKDIAGFYREVEEQGYKVSFESASKKEVDKLVEEGKLYMFQIYNKDFSDKSHGTPNLHTMYFKLLFDENNHGQIRLSGGAELFMRRASLKKEELVVHPANSPIANKNPDNPKKTTTLSYDVYKDKRFSEDQYELHIPIAINKCPKNIFKINTEVRVLLKHDDNPYVIGIDRGERNLLYIVVVDGKGNIVEQYSLNEIINNFNGIRIKTDYHSLLDKKEKERFEARQNWTSIENIKELKAGYISQVVHKICELVEKYDAVIALEDLNSGFKNSRVKVEKQVYQKFEKMLIDKLNYMVDKKSNPCATGGALKGYQITNKFESFKSMSTQNGFIFYIPAWLTSKIDPSTGFVNLLKTKYTSIADSKKFISSFDRIMYVPEEDLFEFALDYKNFSRTDADYIKKWKLYSYGNRIRIFRNPKKNNVFDWEEVCLTSAYKELFNKYGINYQQGDIRALLCEQSDKAFYSSFMALMSLMLQMRNSITGRTDVDFLISPVKNSDGIFYDSRNYEAQENAILPKNADANGAYNIARKVLWAIGQFKKAEDEKLDKVKIAISNKEWLEYAQTSVKH

SEQ ID NO: 37 - protein, 1307 aa, Unknown
  Acidaminococcus sp.
MTQFEGFTNLYQVSKTLRFELIPQGKTLKHIQEQGFIEEDKARNDHYKELKPIIDRIYKTYADQCLQLVQLDWENLSAAIDSYRKEKTEETRNALIEEQATYRNAIHDYFIGRTDNLTDAINKRHAEIYKGLFKAELFNGKVLKQLGTVTTTEHENALLRSFDKFTTYFSGFYENRKNVFSAEDISTAIPHRIVQDNFPKFKENCHIFTRLITAVPSLREHFENVKKAIGIFVSTSIEEVFSFPFYNQLLTQTQIDLYNQLLGGISREAGTEKIKGLNEVLNLAIQKNDETAHIIASLPHRFIPLFKQILSDRNTLSFILEEFKSDEEVIQSFCKYKTLLRNENVLETAEALFNELNSIDLTHIFISHKKLETISSALCDHWDTLRNALYERRISELTGKITKSAKEKVQRSLKHEDINLQEIISAAGKELSEAFKQKTSEILSHAHAALDQPLPTTLKKQEEKEILKSQLDSLLGLYHLLDWFAVDESNEVDPEFSARLTGIKLEMEPSLSFYNKARNYATKKPYSVEKFKLNFQMPTLASGWDVNKEKNNGAILFVKNGLYYLGIMPKQKGRYKALSFEPTEKTSEGFDKMYYDYFPDAAKMIPKCSTQLKAVTAHFQTHTTPILLSNNFIEPLEITKEIYDLNNPEKEPKKFQTAYAKKTGDQKGYREALCKWIDFTRDFLSKYTKTTSIDLSSLRPSSQYKDLGEYYAELNPLLYHISFQRIAEKEIMDAVETGKLYLFQIYNKDFAKGHHGKPNLHTLYWTGLFSPENLAKTSIKLNGQAELFYRPKSRMKRMAHRLGEKMLNKKLKDQKTPIPDTLYQELYDYVNHRLSHDLSDEARALLPNVITKEVSHEIIKDRRFTSDKFFFHVPITLNYQAANSPSKFNQRVNAYLKEHPETPIIGIDRGERNLIYITVIDSTGKILEQRSLNTIQQFDYQKKLDNREKERVAARQAWSVVGTIKDLKQGYLSQVIHEIVDLMIHYQAVVVLENLNFGFKSKRTGIAEKAVYQQFEKMLIDKLNCLVLKDYPAEKVGGVLNPYQLTDQFTSFAKMGTQSGFLFYVPAPYTSKIDPLTGFVDPFVWKTIKNHESRKHFLEGFDFLHYDVKTGDFILHFKMNRNLSFQRGLPGFMPAWDIVFEKNETQFDAKGTPFIAGKRIVPVIENHRFTGRYRDLYPANELIALLEEKGIVFRDGSNILPKLLENDDSHAIDTMVALIRSVLQMRNSNAATGEDYINSPVRDLNGVCFDSRFQNPEWPMDADANGAYHIALKGQLLLNHLKESKDLKLQNGISNQDWLAYIQELRN

SEQ ID NO: 38 - protein, 1300 aa, Francisella novicida
MSIYQEFVNKYSLSKTLRFELIPQGKTLENIKARGLILDDEKRAKDYKKAKQIIDKYHQFFIEEILSSVCISEDLLQNYSDVYFKLKKSDDDNLQKDFKSAKDTIKKQISEYIKDSEKFKNLFNQNLIDAKKGQESDLILWLKQSKDNGIELFKANSDITDIDEALEIIKSFKGWTTYFKGFHENRKNVYSSNDIPTSIIYRIVDDNLPKFLENKAKYESLKDKAPEAINYEQIKKDLAEELTFDIDYKTSEVNQRVFSLDEVFEIANFNNYLNQSGITKFNTIIGGKFVNGENTKRKGINEYINLYSQQINDKTLKKYKMSVLFKQILSDTESKSFVIDKLEDDSDVVTTMQSFYEQIAAFKTVEEKSIKETLSLLFDDLKAQKLDLSKIYFKNDKSLTDLSQQVFDDYSVIGTAVLEYITQQIAPKNLDNPSKKEQELIAKKTEKAKYLSLETIKLALEEFNKHRDIDKQCRFEEILANFAAIPMIFDEIAQNKDNLAQISIKYQNQGKKDLLQASAEDDVKAIKDLLDQTNNLLHKLKIFHISQSEDKANILDKDEHFYLVFEECYFELANIVPLYNKIRNYITQKPYSDEKFKLNFENSTLANGWDKNKEPDNTAILFIKDDKYYLGVMNKKNNKIFDDKAIKENKGEGYKKIVYKLLPGANKMLPKVFFSAKSIKFYNPSEDILRIRNHSTHTKNGSPQKGYEKFEFNIEDCRKFIDFYKQSISKHPEWKDFGFRFSDTQRYNSIDEFYREVENQGYKLTFENISESYIDSVVNQGKLYLFQIYNKDFSAYSKGRPNLHTLYWKALFDERNLQDVVYKLNGEAELFYRKQSIPKKITHPAKEAIANKNKDNPKKESVFEYDLIKDKRFTEDKFFFHCPITINFKSSGANKFNDEINLLLKEKANDVHILSIDRGERHLAYYTLVDGKGNIIKQDTFNIIGNDRMKTNYHDKLAAIEKDRDSARKDWKKINNIKEMKEGYLSQVVHEIAKLVIEYNAIVVFEDLNFGFKRGRFKVEKQVYQKLEKMLIEKLNYLVFKDNEFDKTGGVLRAYQLTAPFETFKKMGKQTGIIYYVPAGFTSKICPVTGFVNQLYPKYESVSKSQEFFSKFDKICYNLDKGYFEFSFDYKNFGDKAAKGKWTIASFGSRLINFRNSDKNHNWDTREVYPTKELEKLLKDYSIEYGHGECIKAAICGESDKKFFAKLTSVLNTILQMRNSKTGTELDYLISPVADVNGNFFDSRQAPKNMPQDADANGAYHIGLKGLMLLGRIKNNQEGKKLNLVIKNEEYFEFVQNRNN

SEQ ID NO: 39 - protein, 1246 aa, Porphyromonas macacae
MKTQHFFEDFTSLYSLSKTIRFELKPIGKTLENIKKNGLIRRDEQRLDDYEKLKKVIDEYHEDFIANILSSFSFSEEILQSYIQNLSESEARAKIEKTMRDTLAKAFSEDERYKSIFKKELVKKDIPVWCPAYKSLCKKFDNFTTSLVPFHENRKNLYTSNEITASIPYRIVHVNLPKFIQNIEALCELQKKMGADLYLEMMENLRNVWPSFVKTPDDLCNLKTYNHLMVQSSISEYNRFVGGYSTEDGTKHQGINEWINIYRQRNKEMRLPGLVFLHKQILAKVDSSSFISDTLENDDQVFCVLRQFRKLFWNTVSSKEDDAASLKDLFCGLSGYDPEAIYVSDAHLATISKNIFDRWNYISDAIRRKTEVLMPRKKESVERYAEKISKQIKKRQSYSLAELDDLLAHYSEESLPAGFSLLSYFTSLGGQKYLVSDGEVILYEEGSNIWDEVLIAFRDLQVILDKDFTEKKLGKDEEAVSVIKKALDSALRLRKFFDLLSGTGAEIRRDSSFYALYTDRMDKLKGLLKMYDKVRNYLTKKPYSIEKFKLHFDNPSLLSGWDKNKELNNLSVIFRQNGYYYLGIMTPKGKNLFKTLPKLGAEEMFYEKMEYKQIAEPMLMLPKVFFPKKTKPAFAPDQSVVDIYNKKTFKTGQKGFNKKDLYRLIDFYKEALTVHEWKLFNFSFSPTEQYRNIGEFFDEVREQAYKVSMVNVPASYIDEAVENGKLYLFQIYNKDFSPYSKGIPNLHTLYWKALFSEQNQSRVYKLCGGGELFYRKASLHMQDTTVHPKGISIHKKNLNKKGETSLFNYDLVKDKRFTEDKFFFHVPISINYKNKKITNVNQMVRDYIAQNDDLQIIGIDRGERNLLYISRIDTRGNLLEQFSLNVIESDKGDLRTDYQKILGDREQERLRRRQEWKSIESIKDLKDGYMSQVVHKICNMVVEHKAIVVLENLNLSFMKGRKKVEKSVYEKFERMLVDKLNYLVVDKKNLSNEPGGLYAAYQLTNPLFSFEELHRYPQSGILFFVDPWNTSLTDPSTGFVNLLGRINYTNVGDARKFFDRFNAIRYDGKGNILFDLDLSRFDVRVETQRKLWTLTTFGSRIAKSKKSGKWMVERIENLSLCFLELFEQFNIGYRVEKDLKKAILSQDRKEFYVRLIYLFNLMMQIRNSDGEEDYILSPALNEKNLQFDSRLIEAKDLPVDADANGAYNVARKGLMVVQRIKRGDHESIHRIGRAQWLRYVQEGIVE

SEQ ID NO: 40 - protein, 1373 aa, Moraxella bovoculi
MLFQDFTHLYPLSKTVRFELKPIDRTLEHIHAKNFLSQDETMADMHQKVKVILDDYHRDFIADMMGEVKLTKLAEFYDVYLKFRKNPKDDELQKQLKDLQAVLRKEIVKPIGNGGKYKAGYDRLFGAKLFKDGKELGDLAKFVIAQEGESSPKLAHLAHFEKFSTYFTGFHDNRKNMYSDEDKHTAIAYRLIHENLPRFIDNLQILTTIKQKHSALYDQIINELTASGLDVSLASHLDGYHKLLTQEGITAYNTLLGGISGEAGSPKIQGINELINSHHNQHCHKSERIAKLRPLHKQILSDGMSVSFLPSKFADDSEMCQAVNEFYRHYADVFAKVQSLFDGFDDHQKDGIYVEHKNLNELSKQAFGDFALLGRVLDGYYVDVVNPEFNERFAKAKTDNAKAKLTKEKDKFIKGVHSLASLEQAIEHYTARHDDESVQAGKLGQYFKHGLAGVDNPIQKIHNNHSTIKGFLERERPAGERALPKIKSGKNPEMTQLRQLKELLDNALNVAHFAKLLTTKTTLDNQDGNFYGEFGVLYDELAKIPTLYNKVRDYLSQKPFSTEKYKLNFGNPTLLNGWDLNKEKDNFGVILQKDGCYYLALLDKAHKKVFDNAPNTGKSIYQKMIYKYLEVRKQFPKVFFSKEAIAINYHPSKELVEIKDKGRQRSDDERLKLYRFILECLKIHPKYDKKFEGAIGDIQLFKKDKKGREVPISEKDLFDKINGIFSSKPKLEMEDFFIGEFKRYNPSQDLVDQYNIYKKIDSNDNRKKENFYNNHPKFKKDLVRYYYESMCKHEEWEESFEFSKKLQDIGCYVDVNELFTEIETRRLNYKISFCNINADYIDELVEQGQLYLFQIYNKDFSPKAHGKPNLHTLYFKALFSEDNLADPIYKLNGEAQIFYRKASLDMNETTIHRAGEVLENKNPDNPKKRQFVYDIIKDKRYTQDKFMLHVPITMNFGVQGMTIKEFNKKVNQSIQQYDEVNVIGIDRGERHLLYLTVINSKGEILEQCSLNDITTASANGTQMTTPYHKILDKREIERLNARVGWGEIETIKELKSGYLSHVVHQISQLMLKYNAIVVLEDLNFGFKRGRFKVEKQIYQNFENALIKKLNHLVLKDKADDEIGSYKNALQLTNNFTDLKSIGKQTGFLFYVPAWNTSKIDPETGFVDLLKPRYENIAQSQAFFGKFDKICYNADKDYFEFHIDYAKFTDKAKNSRQIWTICSHGDKRYVYDKTANQNKGAAKGINVNDELKSLFARHHINEKQPNLVMDICQNNDKEFHKSLMYLLKTLLALRYSNASSDEDFILSPVANDEGVFFNSALADDTQPQNADANGAYHIALKGLWLLNELKNSDDLNKVKLAIDNQTWLNFAQNR

SEQ ID NO: 41 - protein, 1259 aa, Moraxella bovoculi
MGIHGVPAALFQDFTHLYPLSKTVRFELKPIGRTLEHIHAKNFLSQDETMADMYQKVKVILDDYHRDFIADMMGEVKLTKLAEFYDVYLKFRKNPKDDGLQKQLKDLQAVLRKESVKPIGSGGKYKTGYDRLFGAKLFKDGKELGDLAKFVIAQEGESSPKLAHLAHFEKFSTYFTGFHDNRKNMYSDEDKHTAIAYRLIHENLPRFIDNLQILTTIKQKHSALYDQIINELTASGLDVSLASHLDGYHKLLTQEGITAYNRIIGEVNGYTNKHNQICHKSERIAKLRPLHKQILSDGMGVSFLPSKFADDSEMCQAVNEFYRHYTDVFAKVQSLFDGFDDHQKDGIYVEHKNLNELSKQAFGDFALLGRVLDGYYVDVVNPEFNERFAKAKTDNAKAKLTKEKDKFIKGVHSLASLEQAIEHHTARHDDESVQAGKLGQYFKHGLAGVDNPIQKIHNNHSTIKGFLERERPAGERALPKIKSGKNPEMTQLRQLKELLDNALNVAHFAKLLTTKTTLDNQDGNFYGEFGVLYDELAKIPTLYNKVRDYLSQKPFSTEKYKLNFGNPTLLNGWDLNKEKDNFGVILQKDGCYYLALLDKAHKKVFDNAPNTGKNVYQKMVYKLLPGPNKMLPKVFFAKSNLDYYNPSAELLDKYAKGTHKKGDNFNLKDCHALIDFFKAGINKHPEWQHFGFKFSPTSSYRDLSDFYREVEPQGYQVKFVDINADYIDELVEQGKLYLFQIYNKDFSPKAHGKPNLHTLYFKALFSEDNLADPIYKLNGEAQIFYRKASLDMNETTIHRAGEVLENKNPDNPKKRQFVYDIIKDKRYTQDKFMLHVPITMNFGVQGMTIKEFNKKVNQSIQQYDEVNVIGIDRGERHLLYLTVINSKGEILEQRSLNDITTASANGTQVTTPYHKILDKREIERLNARVGWGEIETIKELKSGYLSHVVHQINQLMLKYNAIVVLEDLNFGFKRGRFKVEKQIYQNFENALIKKLNHLVLKDKADDEIGSYKNALQLTNNFTDLKSIGKQTGFLFYVPAWNTSKIDPETGFVDLLKPRYENIAQSQAFFGKFDKICYNTDKGYFEFHIDYAKFTDKAKNSRQKWAICSHGDKRYVYDKTANQNKGAAKGINVNDELKSLFARYHINDKQPNLVMDICQNNDKEFHKSLMCLLKTLLALRYSNASSDEDFILSPVANDEGVFFNSALADDTQPQNADANGAYHIALKGLWLLNELKNSDDLNKVKLAIDNQTWLNFAQNR

SEQ ID NO: 42 - protein, 1269 aa, Moraxella bovoculi
MGIHGVPAALFQDFTHLYPLSKTVRFELKPIGKTLEHIHAKNFLNQDETMADMYQKVKAILDDYHRDFIADMMGEVKLTKLAEFYDVYLKFRKNPKDDGLQKQLKDLQAVLRKEIVKPIGNGGKYKAGYDRLFGAKLFKDGKELGDLAKFVIAQEGESSPKLAHLAHFEKFSTYFTGFHDNRKNMYSDEDKHTAIAYRLIHENLPRFIDNLQILATIKQKHSALYDQIINELTASGLDVSLASHLDGYHKLLTQEGITAYNTLLGGISGEAGSRKIQGINELINSHHNQHCHKSERIAKLRPLHKQILSDGMGVSFLPSKFADDSEVCQAVNEFYRHYADVFAKVQSLFDGFDDYQKDGIYVEYKNLNELSKQAFGDFALLGRVLDGYYVDVVNPEFNERFAKAKTDNAKAKLTKEKDKFIKGVHSLASLEQAIEHYTARHDDESVQAGKLGQYFKHGLAGVDNPIQKIHNNHSTIKGFLERERPAGERALPKIKSDKSPEIRQLKELLDNALNVAHFAKLLTTKTTLHNQDGNFYGEFGALYDELAKIATLYNKVRDYLSQKPFSTEKYKLNFGNPTLLNGWDLNKEKDNFGVILQKDGCYYLALLDKAHKKVFDNAPNTGKSVYQKMIYKLLPGPNKMLPKVFFAKSNLDYYNPSAELLDKYAQGTHKKGDNFNLKDCHALIDFFKAGINKHPEWQHFGFKFSPTSSYQDLSDFYREVEPQGYQVKFVDINADYINELVEQGQLYLFQIYNKDFSPKAHGKPNLHTLYFKALFSEDNLVNPIYKLNGEAEIFYRKASLDMNETTIHRAGEVLENKNPDNPKKRQFVYDIIKDKRYTQDKFMLHVPITMNFGVQGMTIKEFNKKVNQSIQQYDEVNVIGIDRGERHLLYLTVINSKGEILEQRSLNDITTASANGTQMTTPYHKILDKREIERLNARVGWGEIETIKELKSGYLSHVVHQISQLMLKYNAIVVLEDLNFGFKRGRFKVEKQIYQNFENALIKKLNHLVLKDKADDEIGSYKNALQLTNNFTDLKSIGKQTGFLFYVPAWNTSKIDPETGFVDLLKPRYENIAQSQAFFGKFDKICYNADRGYFEFHIDYAKFNDKAKNSRQIWKICSHGDKRYVYDKTANQNKGATIGVNVNDELKSLFTRYHINDKQPNLVMDICQNNDKEFHKSLMYLLKTLLALRYSNASSDEDFILSPVANDEGVFFNSALADDTQPQNADANGAYHIALKGLWLLNELKNSDDLNKVKLAIDNQTWLNFAQNR

SEQ ID NO: 43 - protein, 1306 aa, Unknown
  Thiomicrospira sp.
MGIHGVPAATKTFDSEFFNLYSLQKTVRFELKPVGETASFVEDFKNEGLKRVVSEDERRAVDYQKVKEIIDDYHRDFIEESLNYFPEQVSKDALEQAFHLYQKLKAAKVEEREKALKEWEALQKKLREKVVKCFSDSNKARFSRIDKKELIKEDLINWLVAQNREDDIPTVETFNNFTTYFTGFHENRKNIYSKDDHATAISFRLIHENLPKFFDNVISFNKLKEGFPELKFDKVKEDLEVDYDLKHAFEIEYFVNFVTQAGIDQYNYLLGGKTLEDGTKKQGMNEQINLFKQQQTRDKARQIPKLIPLFKQILSERTESQSFIPKQFESDQELFDSLQKLHNNCQDKFTVLQQAILGLAEADLKKVFIKTSDLNALSNTIFGNYSVFSDALNLYKESLKTKKAQEAFEKLPAHSIHDLIQYLEQFNSSLDAEKQQSTDTVLNYFIKTDELYSRFIKSTSEAFTQVQPLFELEALSSKRRPPESEDEGAKGQEGFEQIKRIKAYLDTLMEAVHFAKPLYLVKGRKMIEGLDKDQSFYEAFEMAYQELESLIIPIYNKARSYLSRKPFKADKFKINFDNNTLLSGWDANKETANASILFKKDGLYYLGIMPKGKTFLFDYFVSSEDSEKLKQRRQKTAEEALAQDGESYFEKIRYKLLPGASKMLPKVFFSNKNIGFYNPSDDILRIRNTASHTKNGTPQKGHSKVEFNLNDCHKMIDFFKSSIQKHPEWGSFGFTFSDTSDFEDMSAFYREVENQGYVISFDKIKETYIQSQVEQGNLYLFQIYNKDFSPYSKGKPNLHTLYWKALFEEANLNNVVAKLNGEAEIFFRRHSIKASDKVVHPANQAIDNKNPHTEKTQSTFEYDLVKDKRYTQDKFFFHVPISLNFKAQGVSKFNDKVNGFLKGNPDVNIIGIDRGERHLLYFTVVNQKGEILVQESLNTLMSDKGHVNDYQQKLDKKEQERDAARKSWTTVENIKELKEGYLSHVVHKLAHLIIKYNAIVCLEDLNFGFKRGRFKVEKQVYQKFEKALIDKLNYLVFKEKELGEVGHYLTAYQLTAPFESFKKLGKQSGILFYVPADYTSKIDPTTGFVNFLDLRYQSVEKAKQLLSDFNAIRFNSVQNYFEFEIDYKKLTPKRKVGTQSKWVICTYGDVRYQNRRNQKGHWETEEVNVTEKLKALFASDSKTTTVIDYANDDNLIDVILEQDKASFFKELLWLLKLTMTLRHSKIKSEDDFILSPVKNEQGEFYDSRKAGEVWPKDADANGAYHIALKGLWNLQQINQWEKGKTLNLAIKNQDWFSFIQEKPYQE

SEQ ID NO: 44 - protein, 1214 aa, Unknown
  Butyrivibrio sp.
MGIHGVPAAYYQNLTKKYPVSKTIRNELIPIGKTLENIRKNNILESDVKRKQDYEHVKGIMDEYHKQLINEALDNYMLPSLNQAAEIYLKKHVDVEDREEFKKTQDLLRREVTGRLKEHENYTKIGKKDILDLLEKLPSISEEDYNALESFRNFYTYFTSYNKVRENLYSDEEKSSTVAYRLINENLPKFLDNIKSYAFVKAAGVLADCIEEEEQDALFMVETFNMTLTQEGIDMYNYQIGKVNSAINLYNQKNHKVEEFKKIPKMKVLYKQILSDREEVFIGEFKDDETLLSSIGAYGNVLMTYLKSEKINIFFDALRESEGKNVYVKNDLSKTTMSNIVFGSWSAFDELLNQEYDLANENKKKDDKYFEKRQKELKKNKSYTLEQMSNLSKEDISPIENYIERISEDIEKICIYNGEFEKIVVNEHDSSRKLSKNIKAVKVIKDYLDSIKELEHDIKLINGSGQELEKNLVVYVGQEEALEQLRPVDSLYNLTRNYLTKKPFSTEKVKLNFNKSTLLNGWDKNKETDNLGILFFKDGKYYLGIMNTTANKAFVNPPAAKTENVFKKVDYKLLPGSNKMLPKVFFAKSNIGYYNPSTELYSNYKKGTHKKGPSFSIDDCHNLIDFFKESIKKHEDWSKFGFEFSDTADYRDISEFYREVEKQGYKLTFTDIDESYINDLIEKNELYLFQIYNKDFSEYSKGKLNLHTLYFMMLFDQRNLDNVVYKLNGEAEVFYRPASIAENELVIHKAGEGIKNKNPNRAKVKETSTFSYDIVKDKRYSKYKFTLHIPITMNFGVDEVRRFNDVINNALRTDDNVNVIGIDRGERNLLYVVVINSEGKILEQISLNSIINKEYDIETNYHALLDEREDDRNKARKDWNTIENIKELKTGYLSQVVNVVAKLVLKYNAIICLEDLNFGFKRGRQKVEKQVYQKFEKMLIEKLNYLVIDKSREQVSPEKMGGALNALQLTSKFKSFAELGKQSGIIYYVPAYLTSKIDPTTGFVNLFYIKYENIEKAKQFFDGFDFIRFNKKDDMFEFSFDYKSFTQKACGIRSKWIVYTNGERIIKYPNPEKNNLFDEKVINVTDEIKGLFKQYRIPYENGEDIKEIIISKAEADFYKRLFRLLHQTLQMRNSTSDGTRDYIISPVKNDRGEFFCSEFSEGTMPKDADANGAYNIARKGLWVLEQIRQKDEGEKVNLSMTNAEWLKYAQLHLL

SEQ ID NO: 45 - protein, 1129 aa, Alicyclobacillus acidoterrestris
MAVKSIKVKLRLDDMPEIRAGLWKLHKEVNAGVRYYTEWLSLLRQENLYRRSPNGDGEQECDKTAEECKAELLERLRARQVENGHRGPAGSDDELLQLARQLYELLVPQAIGAKGDAQQIARKFLSPLADKDAVGGLGIAKAGNKPRWVRMREAGEPGWEEEKEKAETRKSADRTADVLRALADFGLKPLMRVYTDSEMSSVEWKPLRKGQAVRTWDRDMFQQAIERMMSWESWNQRVGQEYAKLVEQKNRFEQKNFVGQEHLVHLVNQLQQDMKEASPGLESKEQTAHYVTGRALRGSDKVFEKWGKLAPDAPFDLYDAEIKNVQRRNTRRFGSHDLFAKLAEPEYQALWREDASFLTRYAVYNSILRKLNHAKMFATFTLPDATAHPIWTRFDKLGGNLHQYTFLFNEFGERRHAIRFHKLLKVENGVAREVDDVTVPISMSEQLDNLLPRDPNEPIALYFRDYGAEQHFTGEFGGAKIQCRRDQLAHMHRRRGARDVYLNVSVRVQSQSEARGERRPPYAAVFRLVGDNHRAFVHFDKLSDYLAEHPDDGKLGSEGLLSGLRVMSVDLGLRTSASISVFRVARKDELKPNSKGRVPFFFPIKGNDNLVAVHERSQLLKLPGETESKDLRAIREERQRTLRQLRTQLAYLRLLVRCGSEDVGRRERSWAKLIEQPVDAANHMTPDWREAFENELQKLKSLHGICSDKEWMDAVYESVRRVWRHMGKQVRDWRKDVRSGERPKIRGYAKDVVGGNSIEQIEYLERQYKFLKSWSFFGKVSGQVIRAEKGSRFAITLREHIDHAKEDRLKKLADRIIMEALGYVYALDERGKGKWVAKYPPCQLILLEELSEYQFNNDRPPSENNQLMQWSHRGVFQELINQAQVHDLLVGTMYAAFSSRFDARTGAPGIRCRRVPARCTQEHNPEPFPWWLNKFVVEHTLDACPLRADDLIPTGEGEIFVSPFSAEEGDFHQIHADLNAAQNLQQRLWSDFDISQIRLRCDWGEVDGELVLIPRLTGKRTADSYSNKVFYTNTGVTYYERERGKKRRKVFAQEKLSEEEAELLVEADEAREKSVVLMRDPSGIINRGNWTRQKEFWSMVNQRIEGYLVKQIRSRVPLQDSACENTGDI

SEQ ID NO: 46 - protein, 1224 aa, Artificial Sequence
  Synthetic polypeptide
MKKIDNFVGCYPVSKTLRFKAIPIGKTQENIEKKRLVEEDEVRAKDYKAVKKLIDRYHREFIEGVLDNVKLDGLEEYYMLFNKSDREESDNKKIEIMEERFRRVISKSFKNNEEYKKIFSKKIIEEILPNYIKDEEEKELVKGFKGFYTAFVGYAQNRENMYSDEKKSTAISYRIVNENMPRFITNIKVFEKAKSILDVDKINEINEYILNNDYYVDDFFNIDFFNYVLNQKGIDIYNAIIGGIVTGDGRKIQGLNECINLYNQENKKIRLPQFKPLYKQILSESESMSFYIDEIESDDMLIDMLKESLQIDSTINNAIDDLKVLFNNIFDYDLSGIFINNGLPITTISNDVYGQWSTISDGWNERYDVLSNAKDKESEKYFEKRRKEYKKVKSFSISDLQELGGKDLSICKKINEIISEMIDDYKSKIEEIQYLFDIKELEKPLVTDLNKIELIKNSLDGLKRIERYVIPFLGTGKEQNRDEVFYGYFIKCIDAIKEIDGVYNKTRNYLTKKPYSKDKFKLYFENPQLMGGWDRNKESDYRSTLLRKNGKYYVAIIDKSSSNCMMNIEEDENDNYEKINYKLLPGPNKMLPKVFFSKKNREYFAPSKEIERIYSTGTFKKDTNFVKKDCENLITFYKDSLDRHEDWSKSFDFSFKESSAYRDISEFYRDVEKQGYRVSFDLLSSNAVNTLVEEGKLYLFQLYNKDFSEKSHGIPNLHTMYFRSLFDDNNKGNIRLNGGAEMFMRRASLNKQDVTVHKANQPIKNKNLLNPKKTTTLPYDVYKDKRFTEDQYEVHIPITMNKVPNNPYKINHMVREQLVKDDNPYVIGIDRGERNLIYVVVVDGQGHIVEQLSLNEIINENNGISIRTDYHTLLDAKERERDESRKQWKQIENIKELKEGYISQVVHKICELVEKYDAVIALEDLNSGFKNSRVKVEKQVYQKFEKMLITKLNYMVDKKKDYNKPGGVLNGYQLTTQFESFSKMGTQNGIMFYIPAWLTSKMDPTTGFVDLLKPKYKNKADAQKFFSQFDSIRYDNQEDAFVFKVNYTKFPRTDADYNKEWEIYTNGERIRVFRNPKKNNEYDYETVNVSERMKELFDSYDLLYDKGELKETICEMEESKFFEELIKLFRLTLQMRNSISGRTDVDYLISPVKNSNGYFYNSNDYKKEGAKYPKDADANGAYNIARKVLWAIEQFKMADEDKLDKTKISIKNQEWLEYAQTHCE

SEQ ID NO: 47 - protein, 500 aa, Artificial Sequence
  Synthetic polypeptide
MEVQKTVMKTLSLRILRPLYSQEIEKEIKEEKERRKQAGGTGELDGGFYKKLEKKHSEMFSFDRLNLLLNQLQREIAKVYNHAISELYIATIAQGNKSNKHYISSIVYNRAYGYFYNAYIALGICSKVEANFRSNELLTQQSALPTAKSDNFPIVLHKQKGAEGEDGGFRISTEGSDLIFEIPIPFYEYNGENRKEPYKWVKKGGQKPVLKLILSTFRRQRNKGWAKDEGTDAEIRKVTEGKYQVSQIEINRGKKLGEHQKWFANFSIEQPIYERKPNRSIVGGLDVGIRSPLVCAINNSFSRYSVDSNDVFKFSKQVFAFRRRLLSKNSLKRKGHGAAHKLEPITEMTEKNDKFRKKIIERWAKEVTNFFVKNQVGIVQIEDLSTMKDREDHFFNQYLRGFWPYYQMQTLIENKLKEYGIEVKRVQAKYTSQLCSNPNCRYWNNYFNFEYRKVNKFPKFKCEKCNLEISADYNAARNLSTPDIEKFVAKATKGINLPEK

SEQ ID NO: 48 - protein, 507 aa, Artificial Sequence
  Synthetic polypeptide
MEEAKTVSKTLSLRILRPLYSAEIEKEIKEEKERRKQGGKSGELDSGFYKKLEKKHTQMFGWDKLNLMLSQLQRQIARVFNQSISELYIETVIQGKKSNKHYTSKIVYNRAYSVFYNAYLALGITSKVEANFRSTELLMQKSSLPTAKSDNFPILLHKQKGVEGEEGGFKISADGNDLIFEIPIPFYEYDSANKKEPFKWIKKGGQKPTIKLILSTFRRQRNKGWAKDEGTDAEIRKVIEGKYQVSHIEINRGKKLGDHQKWFVNFTIEQPIYERKLDKNIIGGIDVGIKSPLVCAVNNSFARYSVDSNDVLKFSKQAFAFRRRLLSKNSLKRSGHGSKNKLDPITRMTEKNDRFRKKIIERWAKEVTNFFIKNQVGTVQIEDLSTMKDRQDNFFNQYLRGFWPYYQMQNLIENKLKEYGIETKRIKARYTSQLCSNPSCRHWNSYFSFDHRKTNNFPKFKCEKCALEISADYNAARNISTPDIEKFVAKATKGINLPDKNENVILE

SEQ ID NO: 49 - protein, 529 aa, Artificial Sequence
  Synthetic polypeptide
MAKNTITKTLKLRIVRPYNSAEVEKIVADEKNNREKIALEKNKDKVKEACSKHLKVAAYCTTQVERNACLFCKARKLDDKFYQKLRGQFPDAVFWQEISEIFRQLQKQAAEIYNQSLIELYYEIFIKGKGIANASSVEHYLSDVCYTRAAELFKNAAIASGLRSKIKSNFRLKELKNMKSGLPTTKSDNFPIPLVKQKGGQYTGFEISNHNSDFIIKIPFGRWQVKKEIDKYRPWEKFDFEQVQKSPKPISLLLSTQRRKRNKGWSKDEGTEAEIKKVMNGDYQTSYIEVKRGSKIGEKSAWMLNLSIDVPKIDKGVDPSIIGGIDVGVKSPLVCAINNAFSRYSISDNDLFHFNKKMFARRRILLKKNRHKRAGHGAKNKLKPITILTEKSERFRKKLIERWACEIADFFIKNKVGTVQMENLESMKRKEDSYFNIRLRGFWPYAEMQNKIEFKLKQYGIEIRKVAPNNTSKTCSKCGHLNNYFNFEYRKKNKFPHFKCEKCNFKENADYNAALNISNPKLKSTKEEP

SEQ ID NO: 50 - protein, 726 aa, Artificial Sequence
  Synthetic polypeptide
MERQKVPQIRKIVRVVPLRILRPKYSDVIENALKKFKEKGDDTNTNDFWRAIRDRDTEFFRKELNFSEDEINQLERDTLFRVGLDNRVLFSYFDFLQEKLMKDYNKIISKLFINRQSKSSFENDLTDEEVEELIEKDVTPFYGAYIGKGIKSVIKSNLGGKFIKSVKIDRETKKVTKLTAINIGLMGLPVAKSDTFPIKIIKTNPDYITFQKSTKENLQKIEDYETGIEYGDLLVQITIPWFKNENKDFSLIKTKEAIEYYKLNGVGKKDLLNINLVLTTYHIRKKKSWQIDGSSQSLVREMANGELEEKWKSFFDTFIKKYGDEGKSALVKRRVNKKSRAKGEKGRELNLDERIKRLYDSIKAKSFPSEINLIPENYKWKLHFSIEIPPMVNDIDSNLYGGIDFGEQNIATLCVKNIEKDDYDFLTIYGNDLLKHAQASYARRRIMRVQDEYKARGHGKSRKTKAQEDYSERMQKLRQKITERLVKQISDFFLWRNKFHMAVCSLRYEDLNTLYKGESVKAKRMRQFINKQQLFNGIERKLKDYNSEIYVNSRYPHYTSRLCSKCGKLNLYFDFLKFRTKNIIIRKNPDGSEIKYMPFFICEFCGWKQAGDKNASANIADKDYQDKLNKEKEFCNIRKPKSKKEDIGEENEEERDYSRRFNRNSFIYNSLKKDNKLNQEKLFDEWKNQLKRKIDGRNKFEPKEYKDRFSYLFAYYQEIIKNESES

SEQ ID NO: 51 - protein, 517 aa, Artificial Sequence
  Synthetic polypeptide
MVPTELITKTLQLRVIRPLYFEEIEKELAELKEQKEKEFEETNSLLLESKKIDAKSLKKLKRKARSSAAVEFWKIAKEKYPDILTKPEMEFIFSEMQKMMARFYNKSMTNIFIEMNNDEKVNPLSLISKASTEANQVIKCSSISSGLNRKIAGSINKTKFKQVRDGLISLPTARTETFPISFYKSTANKDEIPISKINLPSEEEADLTITLPFPFFEIKKEKKGQKAYSYFNIIEKSGRSNNKIDLLLSTHRRQRRKGWKEEGGTSAEIRRLMEGEFDKEWEIYLGEAEKSEKAKNDLIKNMTRGKLSKDIKEQLEDIQVKYFSDNNVESWNDLSKEQKQELSKLRKKKVEELKDWKHVKEILKTRAKIGWVELKRGKRQRDRNKWFVNITITRPPFINKELDDTKFGGIDLGVKVPFVCAVHGSPARLIIKENEILQFNKMVSARNRQITKDSEQRKGRGKKNKFIKKEIFNERNELFRKKIIERWANQIVKFFEDQKCATVQIENLESFDRTSYK

SEQ ID NO: 52 - protein, 481 aa, Artificial Sequence
  Synthetic polypeptide
MKSDTKDKKIIIHQTKTLSLRIVKPQSIPMEEFTDLVRYHQMIIFPVYNNGAIDLYKKLFKAKIQKGNEARAIKYFMNKIVYAPIANTVKNSYIALGYSTKMQSSFSGKRLWDLRFGEATPPTIKADFPLPFYNQSGFKVSSENGEFIIGIPFGQYTKKTVSDIEKKTSFAWDKFTLEDTTKKTLIELLLSTKTRKMNEGWKNNEGTEAEIKRVMDGTYQVTSLEILQRDDSWFVNFNIAYDSLKKQPDRDKIAGIHMGITRPLTAVIYNNKYRALSIYPNTVMHLTQKQLARIKEQRTNSKYATGGHGRNAKVTGTDTLSEAYRQRRKKIIEDWIASIVKFAINNEIGTIYLEDISNTNSFFAAREQKLIYLEDISNTNSFLSTYKYPISAISDTLQHKLEEKAIQVIRKKAYYVNQICSLCGHYNKGFTYQFRRKNKFPKMKCQGCLEATSTEFNAAANVANPDYEKLLIKHGLLQLKK

SEQ ID NO: 53 - protein, 358 aa, Artificial Sequence
  Synthetic polypeptide
MSTITRQVRLSPTPEQSRLLMAHCQQYISTVNVLVAAFDSEVLTGKVSTKDFRAALPSAVKNQALRDAQSVFKRSVELGCLPVLKKPHCQWNNQNWRVEGDQLILPICKDGKTQQERFRCAAVALEGKAGILRIKKKRGKWIADLTVTQEDAPESSGSAIMGVDLGIKVPAVAHIGGKGTRFFGNGRSQRSMRRRFYARRKTLQKAKKLRAVRKSKGKEARWMKTINHQLSRQIVNHAHALGVGTIKIEALQGIRKGTTRKSRGAAARKNNRMTNTWSFSQLTLFITYKAQRQGITVEQVDPAYTSQDCPACRARNGAQDRTYVCSECGWRGHRDTVGAINISRRAGLSGHRRGATGA

SEQ ID NO: 54 - protein, 507 aa, Artificial Sequence
  Synthetic polypeptide
MIAQKTIKIKLNPTKEQIIKLNSIIEEYIKVSNFTAKKIAEIQESFTDSGLTQGTCSECGKEKTYRKYHLLKKDNKLFCITCYKRKYSQFTLQKVEFQNKTGLRNVAKLPKTYYTNAIRFASDTFSGFDEIIKKKQNRLNSIQNRLNFWKELLYNPSNRNEIKIKVVKYAPKTDTREHPHYYSEAEIKGRIKRLEKQLKKFKMPKYPEFTSETISLQRELYSWKNPDELKISSITDKNESMNYYGKEYLKRYIDLINSQTPQILLEKENNSFYLCFPITKNIEMPKIDDTFEPVGIDWGITRNIAVVSILDSKTKKPKFVKFYSAGYILGKRKHYKSLRKHFGQKKRQDKINKLGTKEDRFIDSNIHKLAFLIVKEIRNHSNKPIILMENITDNREEAEKSMRQNILLHSVKSRLQNYIAYKALWNNIPTNLVKPEHTSQICNRCGHQDRENRPKGSKLFKCVKCNYMSNADFNASINIARKFYIGEYEPFYKDNEKMKSGVNSISM

SEQ ID NO: 55 - protein, 534 aa, Artificial Sequence
  Synthetic polypeptide
LKLSEQENITTGVKFKLKLDKETSEGLNDYFDEYGKAINFAIKVIQKELAEDRFAGKVRLDENKKPLLNEDGKKIWDFPNEFCSCGKQVNRYVNGKSLCQECYKNKFTEYGIRKRMYSAKGRKAEQDINIKNSTNKISKTHFNYAIREAFILDKSIKKQRKERFRRLREMKKKLQEFIEIRDGNKILCPKIEKQRVERYIHPSWINKEKKLEDFRGYSMSNVLGKIKILDRNIKREEKSLKEKGQINFKARRLMLDKSVKFLNDNKISFTISKNLPKEYELDLPEKEKRLNWLKEKIKIIKNQKPKYAYLLRKDDNFYLQYTLETEFNLKEDYSGIVGIDRGVSHIAVYTFVHNNGKNERPLFLNSSEILRLKNLQKERDRFLRRKHNKKRKKSNMRNIEKKIQLILHNYSKQIVDFAKNKNAFIVFEKLEKPKKNRSKMSKKSQYKLSQFTFKKLSDLVDYKAKREGIKVLYISPEYTSKECSHCGEKVNTQRPFNGNSSLFKCNKCGVELNADYNASINIAKKGLNILNSTN

SEQ ID NO: 56 - protein, 537 aa, Artificial Sequence
  Synthetic polypeptide
MEESIITGVKFKLRIDKETTKKLNEYFDEYGKAINFAVKIIQKELADDRFAGKAKLDQNKNPILDENGKKIYEFPDEFCSCGKQVNKYVNNKPFCQECYKIRFTENGIRKRMYSAKGRKAEHKINILNSTNKISKTHFNYAIREAFILDKSIKKQRKKRNERLRESKKRLQQFIDMRDGKREICPTIKGQKVDRFIHPSWITKDKKLEDFRGYTLSIINSKIKILDRNIKREEKSLKEKGQIIFKAKRLMLDKSIRFVGDRKVLFTISKTLPKEYELDLPSKEKRLNWLKEKIEIIKNQKPKYAYLLRKNIESEKKPNYEYYLQYTLEIKPELKDFYDGAIGIDRGINHIAVCTFISNDGKVTPPKFFSSGEILRLKNLQKERDRFLLRKHNKNRKKGNMRVIENKINLILHRYSKQIVDMAKKLNASIVFEELGRIGKSRTKMKKSQRYKLSLFIFKKLSDLVDYKSRREGIRVTYVPPEYTSKECSHCGEKVNTQRPFNGNYSLFKCNKCGIQLNSDYNASINIAKKGLKIPNST

SEQ ID NO: 57 - protein, 540 aa, Artificial Sequence
  Synthetic polypeptide
LWTIVIGDFIEMPKQDLVTTGIKFKLDVDKETRKKLDDYFDEYGKAINFAVKIIQKNLKEDRFAGKIALGEDKKPLLDKDGKKIYNYPNESCSCGNQVRRYVNAKPFCVDCYKLKFTENGIRKRMYSARGRKADSDINIKNSTNKISKTHFNYAIREGFILDKSLKKQRSKRIKKLLELKRKLQEFIDIRQGQMVLCPKIKNQRVDKFIHPSWLKRDKKLEEFRGYSLSVVEGKIKIFNRNILREEDSLRQRGHVNFKANRIMLDKSVRFLDGGKVNFNLNKGLPKEYLLDLPKKENKLSWLNEKISLIKLQKPKYAYLLRREGSFFIQYTIENVPKTFSDYLGAIGIDRGISHIAVCTFVSKNGVNKAPVFFSSGEILKLKSLQKQRDLFLRGKHNKIRKKSNMRNIDNKINLILHKYSRNIVNLAKSEKAFIVFEKLEKIKKSRFKMSKSLQYKLSQFTFKKLSDLVEYKAKIEGIKVDYVPPEYTSKECSHCGEKVDTQRPFNGNSSLFKCNKCRVQLNADYNASINIAKKSLNISN

SEQ ID NO: 58 - protein, 542 aa, Artificial Sequence
  Synthetic polypeptide
MSKTTISVKLKIIDLSSEKKEFLDNYFNEYAKATTFCQLRIRRLLRNTHWLGKKEKSSKKWIFESGICDLCGENKELVNEDRNSGEPAKICKRCYNGRYGNQMIRKLFVSTKKREVQENMDIRRVAKLNNTHYHRIPEEAFDMIKAADTAEKRRKKNVEYDKKRQMEFIEMFNDEKKRAARPKKPNERETRYVHISKLESPSKGYTLNGIKRKIDGMGKKIERAEKGLSRKKIFGYQGNRIKLDSNWVRFDLAESEITIPSLFKEMKLRITGPTNVHSKSGQIYFAEWFERINKQPNNYCYLIRKTSSNGKYEYYLQYTYEAEVEANKEYAGCLGVDIGCSKLAAAVYYDSKNKKAQKPIEIFTNPIKKIKMRREKLIKLLSRVKVRHRRRKLMQLSKTEPIIDYTCHKTARKIVEMANTAKAFISMENLETGIKQKQQARETKKQKFYRNMFLFRKLSKLIEYKALLKGIKIVYVKPDYTSQTCSSCGADKEKTERPSQAIFRCLNPTCRYYQRDINADFNAAVNIAKKALNNTEVVTTLL

SEQ ID NO: 59 - protein, 564 aa, Artificial Sequence
  Synthetic polypeptide
MARAKNQPYQKLTTTTGIKFKLDLSEEEGKRFDEYFSEYAKAVNFCAKVIYQLRKNLKFAGKKELAAKEWKFEISNCDFCNKQKEIYYKNIANGQKVCKGCHRTNFSDNAIRKKMIPVKGRKVESKFNIHNTTKKISGTHRHWAFEDAADIIESMDKQRKEKQKRLRREKRKLSYFFELFGDPAKRYELPKVGKQRVPRYLHKIIDKDSLTKKRGYSLSYIKNKIKISERNIERDEKSLRKASPIAFGARKIKMSKLDPKRAFDLENNVFKIPGKVIKGQYKFFGTNVANEHGKKFYKDRISKILAGKPKYFYLLRKKVAESDGNPIFEYYVQWSIDTETPAITSYDNILGIDAGITNLATTVLIPKNLSAEHCSHCGNNHVKPIFTKFFSGKELKAIKIKSRKQKYFLRGKHNKLVKIKRIRPIEQKVDGYCHVVSKQIVEMAKERNSCIALEKLEKPKKSKFRQRRREKYAVSMFVFKKLATFIKYKAAREGIEIIPVEPEGTSYTCSHCKNAQNNQRPYFKPNSKKSWTSMFKCGKCGIELNSDYNAAFNIAQKALNMTSA

SEQ ID NO: 60 - protein, 610 aa, Artificial Sequence
  Synthetic polypeptide
MDEKHFFCSYCNKELKISKNLINKISKGSIREDEAVSKAISIHNKKEHSLILGIKFKLFIENKLDKKKLNEYFDNYSKAVTFAARIFDKIRSPYKFIGLKDKNTKKWTFPKAKCVFCLEEKEVAYANEKDNSKICTECYLKEFGENGIRKKIYSTRGRKVEPKYNIFNSTKELSSTHYNYAIRDAFQLLDALKKQRQKKLKSIFNQKLRLKEFEDIFSDPQKRIELSLKPHQREKRYIHLSKSGQESINRGYTLRFVRGKIKSLTRNIEREEKSLRKKTPIHFKGNRLMIFPAGIKFDFASNKVKISISKNLPNEFNFSGTNVKNEHGKSFFKSRIELIKTQKPKYAYVLRKIKREYSKLRNYEIEKIRLENPNADLCDFYLQYTIETESRNNEEINGIIGIDRGITNLACLVLLKKGDKKPSGVKFYKGNKILGMKIAYRKHLYLLKGKRNKLRKQRQIRAIEPKINLILHQISKDIVKIAKEKNFAIALEQLEKPKKARFAQRKKEKYKLALFTFKNLSTLIEYKSKREGIPVIYVPPEKTSQMCSHCAINGDEHVDTQRPYKKPNAQKPSYSLFKCNKCGIELNADYNAAFNIAQKGLKTLMLNHSH

SEQ ID NO: 61 - protein, 369 aa, Artificial Sequence
  Synthetic polypeptide
MLQTLLVKLDPSKEQYKMLYETMERFNEACNQIAETVFAIHSANKIEVQKTVYYPIREKFGLSAQLTILAIRKVCEAYKRDKSIKPEFRLDGALVYDQRVLSWKGLDKVSLVTLQGRQIIPIKFGDYQKARMDRIRGQADLILVKGVFYLCVVVEVSEESPYDPKGVLGVDLGIKNLAVDSDGEVHSGEQTTNTRERLDSLKARLQSKGTKSAKRHLKKLSGRMAKFSKDVNHCISKKLVAKAKGTLMSIALEDLQGIRDRVTVRKAQRRNLHTWNFGLLRMFVDYKAKIAGVPLVFVDPRNTSRTCPSCGHVAKANRPTRDEFRCVSCGFAGAADHIAAMNIAFRAEVSQPIVTRFFVQSQAPSFRVG

SEQ ID NO: 62 - protein, 552 aa, Artificial Sequence
  Synthetic polypeptide
MDEEPDSAEPNLAPISVKLKLVKLDGEKLAALNDYFNEYAKAVNFCELKMQKIRKNLVNIRGTYLKEKKAWINQTGECCICKKIDELRCEDKNPDINGKICKKCYNGRYGNQMIRKLFVSTNKRAVPKSLDIRKVARLHNTHYHRIPPEAADIIKAIETAERKRRNRILFDERRYNELKDALENEEKRVARPKKPKEREVRYVPISKKDTPSKGYTMNALVRKVSGMAKKIERAKRNLNKRKKIEYLGRRILLDKNWVRFDFDKSEISIPTMKEFFGEMRFEITGPSNVMSPNGREYFTKWFDRIKAQPDNYCYLLRKESEDETDFYLQYTWRPDAHPKKDYTGCLGIDIGGSKLASAVYFDADKNRAKQPIQIFSNPIGKWKTKRQKVIKVLSKAAVRHKTKKLESLRNIEPRIDVHCHRIARKIVGMALAANAFISMENLEGGIREKQKAKETKKQKFSRNMFVFRKLSKLIEYKALMEGVKVVYIVPDYTSQLCSSCGTNNTKRPKQAIFMCQNTECRYFGKNINADFNAAINIAKKALNRKDIVRELS

SEQ ID NO: 63 - protein, 534 aa, Artificial Sequence
  Synthetic polypeptide
MEKNNSEQTSITTGIKFKLKLDKETKEKLNNYFDEYGKAINFAVRIIQMQLNDDRLAGKYKRDEKGKPILGEDGKKILEIPNDFCSCGNQVNHYVNGVSFCQECYKKRFSENGIRKRMYSAKGRKAEQDINIKNSTNKISKTHFNYAIREAFNLDKSIKKQREKRFKKLKDMKRKLQEFLEIRDGKRVICPKIEKQKVERYIHPSWINKEKKLEEFRGYSLSIVNSKIKSFDRNIQREEKSLKEKGQINFKAQRLMLDKSVKFLKDNKVSFTISKELPKTFELDLPKKEKKLNWLNEKLEIIKNQKPKYAYLLRKENNIFLQYTLDSIPEIHSEYSGAVGIDRGVSHIAVYTFLDKDGKNERPFFLSSSGILRLKNLQKERDKFLRKKHNKIRKKGNMRNIEQKINLILHEYSKQIVNFAKDKNAFIVFELLEKPKKSRERMSKKIQYKLSQFTFKKLSDLVDYKAKREGIKVIYVEPAYTSKDCSHCGERVNTQRPFNGNFSLFKCNKCGIVLNSDYNASLNIARKGLNISAN

SEQ ID NO: 64 - protein, 577 aa, Artificial Sequence
  Synthetic polypeptide
MAEEKFFFCEKCNKDIKIPKNYINKQGAEEKARAKHEHRVHALILGIKFKIYPKKEDISKLNDYFDEYAKAVTFTAKIVDKLKAPFLFAGKRDKDTSKKKWVFPVDKCSFCKEKTEINYRTKQGKNICNSCYLTEFGEQGLLEKIYATKGRKVSSSFNLFNSTKKLTGTHNNYVVKESLQLLDALKKQRSKRLKKLSNTRRKLKQFEEMFEKEDKRFQLPLKEKQRELRFIHVSQKDRATEFKGYTMNKIKSKIKVLRRNIEREQRSLNRKSPVFFRGTRIRLSPSVQFDDKDNKIKLTLSKELPKEYSFSGLNVANEHGRKFFAEKLKLIKENKSKYAYLLRRQVNKNNKKPIYDYYLQYTVEFLPNIITNYNGILGIDRGINTLACIVLLENKKEKPSFVKFFSGKGILNLKNKRRKQLYFLKGVHNKYRKQQKIRPIEPRIDQILHDISKQIIDLAKEKRVAISLEQLEKPQKPKFRQSRKAKYKLSQFNFKTLSNYIDYKAKKEGIRVIYIAPEMTSQNCSRCAMKNDLHVNTQRPYKNTSSLFKCNKCGVELNADYNAAFNIAQKGLKILNS

SEQ ID NO: 65 - protein, 613 aa, Artificial Sequence
  Synthetic polypeptide
MISLKLKLLPDEEQKKLLDEMFWKWASICTRVGFGRADKEDLKPPKDAEGVWFSLTQLNQANTDINDLREAMKHQKHRLEYEKNRLEAQRDDTQDALKNPDRREISTKRKDLFRPKASVEKGFLKLKYHQERYWVRRLKEINKLIERKTKTLIKIEKGRIKFKATRITLHQGSFKIRFGDKPAFLIKALSGKNQIDAPFVVVPEQPICGSVVNSKKYLDEITTNFLAYSVNAMLFGLSRSEEMLLKAKRPEKIKKKEEKLAKKQSAFENKKKELQKLLGRELTQQEEAIIEETRNQFFQDFEVKITKQYSELLSKIANELKQKNDFLKVNKYPILLRKPLKKAKSKKINNLSPSEWKYYLQFGVKPLLKQKSRRKSRNVLGIDRGLKHLLAVTVLEPDKKTFVWNKLYPNPITGWKWRRRKLLRSLKRLKRRIKSQKHETIHENQTRKKLKSLQGRIDDLLHNISRKIVETAKEYDAVIVVEDLQSMRQHGRSKGNRLKTLNYALSLFDYANVMQLIKYKAGIEGIQIYDVKPAGTSQNCAYCLLAQRDSHEYKRSQENSKIGVCLNPNCQNHKKQIDADLNAARVIASCYALKINDSQPFGTRKRFKKRTTN

SEQ ID NO: 66 - protein, 615 aa, Artificial Sequence
  Synthetic polypeptide
METLSLKLKLNPSKEQLLVLDKMFWKWASICTRLGLKKAEMSDLEPPKDAEGVWFSKTQLNQANTDVNDLRKAMQHQGKRIEYELDKVENRRNEIQEMLEKPDRRDISPNRKDLFRPKAAVEKGYLKLKYHKLGYWSKELKTANKLIERKRKTLAKIDAGKMKFKPTRISLHTNSFRIKFGEEPKIALSTTSKHEKIELPLITSLQRPLKTSCAKKSKTYLDAAILNFLAYSTNAALFGLSRSEEMLLKAKKPEKIEKRDRKLATKRESFDKKLKTLEKLLERKLSEKEKSVFKRKQTEFFDKFCITLDETYVEALHRIAEELVSKNKYLEIKKYPVLLRKPESRLRSKKLKNLKPEDWTYYIQFGFQPLLDTPKPIKTKTVLGIDRGVRHLLAVSIFDPRTKTFTFNRLYSNPIVDWKWRRRKLLRSIKRLKRRLKSEKHVHLHENQFKAKLRSLEGRIEDHFHNLSKEIVDLAKENNSVIVVENLGGMRQHGRGRGKWLKALNYALSHFDYAKVMQLIKYKAELAGVFVYDVAPAGTSINCAYCLLNDKDASNYTRGKVINGKKNTKIGECKTCKKEFDADLNAARVIALCYEKRLNDPQPFGTRKQFKPKKP

SEQ ID NO: 67 - protein, 775 aa, Artificial Sequence
  Synthetic polypeptide
MKALKLQLIPTRKQYKILDEMFWKWASLANRVSQKGESKETLAPKKDIQKIQFNATQLNQIEKDIKDLRGAMKEQQKQKERLLLQIQERRSTISEMLNDDNNKERDPHRPLNFRPKGWRKFHTSKHWVGELSKILRQEDRVKKTIERIVAGKISFKPKRIGIWSSNYKINFFKRKISINPLNSKGFELTLMTEPTQDLIGKNGGKSVLNNKRYLDDSIKSLLMFALHSRFFGLNNTDTYLLGGKINPSLVKYYKKNQDMGEFGREIVEKFERKLKQEINEQQKKIIMSQIKEQYSNRDSAFNKDYLGLINEFSEVFNQRKSERAEYLLDSFEDKIKQIKQEIGESLNISDWDFLIDEAKKAYGYEEGFTEYVYSKRYLEILNKIVKAVLITDIYFDLRKYPILLRKPLDKIKKISNLKPDEWSYYIQFGYDSINPVQLMSTDKFLGIDRGLTHLLAYSVFDKEKKEFIINQLEPNPIMGWKWKLRKVKRSLQHLERRIRAQKMVKLPENQMKKKLKSIEPKIEVHYHNISRKIVNLAKDYNASIVVESLEGGGLKQHGRKKNARNRSLNYALSLFDYGKIASLIKYKADLEGVPMYEVLPAYTSQQCAKCVLEKGSFVDPEIIGYVEDIGIKGSLLDSLFEGTELSSIQVLKKIKNKIELSARDNHNKEINLILKYNFKGLVIVRGQDKEEIAEHPIKEINGKFAILDFVYKRGKEKVGKKGNQKVRYTGNKKVGYCSKHGQVDADLNASRVIALCKYLDINDPILFGEQRKSFK

SEQ ID NO: 68 - protein, 777 aa, Artificial Sequence
  Synthetic polypeptide
MVTRAIKLKLDPTKNQYKLLNEMFWKWASLANRFSQKGASKETLAPKDGTQKIQFNATQLNQIKKDVDDLRGAMEKQGKQKERLLIQIQERLLTISEILRDDSKKEKDPHRPQNFRPFGWRRFHTSAYWSSEASKLTRQVDRVRRTIERIKAGKINFKPKRIGLWSSTYKINFLKKKINISPLKSKSFELDLITEPQQKIIGKEGGKSVANSKKYLDDSIKSLLIFAIKSRLFGLNNKDKPLFENIITPNLVRYHKKGQEQENFKKEVIKKFENKLKKEISQKQKEIIFSQIERQYENRDATFSEDYLRAISEFSEIFNQRKKERAKELLNSFNEKIRQLKKEVNGNISEEDLKILEVEAEKAYNYENGFIEWEYSEQFLGVLEKIARAVLISDNYFDLKKYPILIRKPTNKSKKITNLKPEEWDYYIQFGYGLINSPMKIETKNFMGIDRGLTHLLAYSIFDRDSEKFTINQLELNPIKGWKWKLRKVKRSLQHLERRMRAQKGVKLPENQMKKRLKSIEPKIESYYHNLSRKIVNLAKANNASIVVESLEGGGLKQHGRKKNSRHRALNYALSLFDYGKIASLIKYKSDLEGVPMYEVLPAYTSQQCAKCVLKKGSFVEPEIIGYIEEIGFKENLLTLLFEDTGLSSVQVLKKSKNKMTLSARDKEGKMVDLVLKYNFKGLVISQEKKKEEIVEFPIKEIDGKFAVLDSAYKRGKERISKKGNQKLVYTGNKKVGYCSVHGQVDADLNASRVIALCKYLGINEPIVFGEQRKSFK

SEQ ID NO: 69 - protein, 610 aa, Artificial Sequence
  Synthetic polypeptide
LDLITEPIQPHKSSSLRSKEFLEYQISDFLNFSLHSLFFGLASNEGPLVDFKIYDKIVIPKPEERFPKKESEEGKKLDSFDKRVEEYYSDKLEKKIERKLNTEEKNVIDREKTRIWGEVNKLEEIRSIIDEINEIKKQKHISEKSKLLGEKWKKVNNIQETLLSQEYVSLISNLSDELTNKKKELLAKKYSKFDDKIKKIKEDYGLEFDENTIKKEGEKAFLNPDKFSKYQFSSSYLKLIGEIARSLITYKGFLDLNKYPIIFRKPINKVKKIHNLEPDEWKYYIQFGYEQINNPKLETENILGIDRGLTHILAYSVFEPRSSKFILNKLEPNPIEGWKWKLRKLRRSIQNLERRWRAQDNVKLPENQMKKNLRSIEDKVENLYHNLSRKIVDLAKEKNACIVFEKLEGQGMKQHGRKKSDRLRGLNYKLSLFDYGKIAKLIKYKAEIEGIPIYRIDSAYTSQNCAKCVLESRRFAQPEEISCLDDFKEGDNLDKRILEGTGLVEAKIYKKLLKEKKEDFEIEEDIAMFDTKKVIKENKEKTVILDYVYTRRKEIIGTNHKKNIKGIAKYTGNTKIGYCMKHGQVDADLNASRTIALCKNFDINNPEIWK

SEQ ID NO: 70 - protein, 632 aa, Artificial Sequence
  Synthetic polypeptide
MSDESLVSSEDKLAIKIKIVPNAEQAKMLDEMFKKWSSICNRISRGKEDIETLRPDEGKELQFNSTQLNSATMDVSDLKKAMARQGERLEAEVSKLRGRYETIDASLRDPSRRHTNPQKPSSFYPSDWDISGRLTPRFHTARHYSTELRKLKAKEDKMLKTINKIKNGKIVFKPKRITLWPSSVNMAFKGSRLLLKPFANGFEMELPIVISPQKTADGKSQKASAEYMRNALLGLAGYSINQLLFGMNRSQKMLANAKKPEKVEKFLEQMKNKDANFDKKIKALEGKWLLDRKLKESEKSSIAVVRTKFFKSGKVELNEDYLKLLKHMANEILERDGFVNLNKYPILSRKPMKRYKQKNIDNLKPNMWKYYIQFGYEPIFERKASGKPKNIMGIDRGLTHLLAVAVFSPDQQKFLFNHLESNPIMHWKWKLRKIRRSIQHMERRIRAEKNKHIHEAQLKKRLGSIEEKTEQHYHIVSSKIINWAIEYEAAIVLESLSHMKQRGGKKSVRTRALNYALSLFDYEKVARLITYKARIRGIPVYDVLPGMTSKTCATCLLNGSQGAYVRGLETTKAAGKATKRKNMKIGKCMVCNSSENSMIDADLNAARVIAICKYKNLNDPQPAGSRKVFKRF

SEQ ID NO: 71 - protein, 625 aa, Artificial Sequence
  Synthetic polypeptide
MLALKLKIMPTEKQAEILDAMFWKWASICSRIAKMKKKVSVKENKKELSKKIPSNSDIWFSKTQLCQAEVDVGDHKKALKNFEKRQESLLDELKYKVKAINEVINDESKREIDPNNPSKFRIKDSTKKGNLNSPKFFTLKKWQKILQENEKRIKKKESTIEKLKRGNIFFNPTKISLHEEEYSINFGSSKLLLNCFYKYNKKSGINSDQLENKFNEFQNGLNIICSPLQPIRGSSKRSFEFIRNSIINFLMYSLYAKLFGIPRSVKALMKSNKDENKLKLEEKLKKKKSSFNKTVKEFEKMIGRKLSDNESKILNDESKKFFEIIKSNNKYIPSEEYLKLLKDISEEIYNSNIDFKPYKYSILIRKPLSKFKSKKLYNLKPTDYKYYLQLSYEPFSKQLIATKTILGIDRGLKHLLAVSVFDPSQNKFVYNKLIKNPVFKWKKRYHDLKRSIRNRERRIRALTGVHIHENQLIKKLKSMKNKINVLYHNVSKNIVDLAKKYESTIVLERLENLKQHGRSKGKRYKKLNYVLSNFDYKKIESLISYKAKKEGVPVSNINPKYTSKTCAKCLLEVNQLSELKNEYNRDSKNSKIGICNIHGQIDADLNAARVIALCYSKNLNEPHFK

SEQ ID NO: 72 - protein, 517 aa, Artificial Sequence
  Synthetic polypeptide
VINLFGYKFALYPNKTQEELLNKHLGECGWLYNKAIEQNEYYKADSNIEEAQKKFELLPDKNSDEAKVLRGNISKDNYVYRTLVKKKKSEINVQIRKAVVLRPAETIRNLAKVKKKGLSVGRLKFIPIREWDVLPFKQSDQIRLEENYLILEPYGRLKFKMHRPLLGKPKTFCIKRTATDRWTISFSTEYDDSNMRKNDGGQVGIDVGLKTHLRLSNENPDEDPRYPNPKIWKRYDRRLTILQRRISKSKKLGKNRTRLRLRLSRLWEKIRNSRADLIQNETYEILSENKLIAIEDLNVKGMQEKKDKKGRKGRTRAQEKGLHRSISDAAFSEFRRVLEYKAKRFGSEVKPVSAIDSSKECHNCGNKKGMPLESRIYECPKCGLKIDRDLNSAKVILARATGVRPGSNARADTKISATAGASVQTEGTVSEDFRQQMETSDQKPMQGEGSKEPPMNPEHKSSGRGSKHVNIGCKNKVGLYNEDENSRSTEKQIMDENRSTTEDMVEIGALHSPVLTT

SEQ ID NO: 73 - protein, 410 aa, Artificial Sequence
  Synthetic polypeptide
MIASIDYEAVSQALIVFEFKAKGKDSQYQAIDEAIRSYRFIRNSCLRYWMDNKKVGKYDLNKYCKVLAKQYPFANKLNSQARQSAAECSWSAISRFYDNCKRKVSGKKGFPKFKKHARSVEYKTSGWKLSENRKAITFTDKNGIGKLKLKGTYDLHFSQLEDMKRVRLVRRADGYYVQFCISVDVKVETEPTGKAIGLDVGIKYFLADSSGNTIENPQFYRKAEKKLNRANRRKSKKYIRGVKPQSKNYHKARCRYARKHLRVSRQRKEYCKRVAYCVIHSNDVVAYEDLNVKGMVKNRHLAKSISDVAWSTFRHWLEYFAIKYGKLTIPVAPHNTSQNCSNCDKKVPKSLSTRTHICHHCGYSEDRDVNAAKNILKKALSTVGQTGSLKLGEIEPLLVLEQSCTRKFDL

SEQ ID NO: 74 - protein, 486 aa, Artificial Sequence
  Synthetic polypeptide
LAEENTLHLTLAMSLPLNDLPENRTRSELWRRQWLPQKKLSLLLGVNQSVRKAAADCLRWFEPYQELLWWEPTDPDGKKLLDKEGRPIKRTAGHMRVLRKLEEIAPFRGYQLGSAVKNGLRHKVADLLLSYAKRKLDPQFTDKTSYPSIGDQFPIVWTGAFVCYEQSITGQLYLYLPLFPRGSHQEDITNNYDPDRGPALQVFGEKEIARLSRSTSGLLLPLQFDKWGEATFIRGENNPPTWKATHRRSDKKWLSEVLLREKDFQPKRVELLVRNGRIFVNVACEIPTKPLLEVENFMGVSFGLEHLVTVVVINRDGNVVHQRQEPARRYEKTYFARLERLRRRGGPFSQELETFHYRQVAQIVEEALRFKSVPAVEQVGNIPKGRYNPRLNLRLSYWPFGKLADLTSYKAVKEGLPKPYSVYSATAKMLCSTCGAANKEGDQPISLKGPTVYCGNCGTRHNTGFNTALNLARRAQELFVKGVVAR

SEQ ID NO: 75 - protein, 602 aa, Artificial Sequence
  Synthetic polypeptide
MSQSLLKWHDMAGRDKDASRSLQKSAVEGVLLHLTASHRVALEMLEKSVSQTVAVTMEAAQQRLVIVLEDDPTKATSRKRVISADLQFTREEFGSLPNWAQKLASTCPEIATKYADKHINSIRIAWGVAKESTNGDAVEQKLQWQIRLLDVTMFLQQLVLQLADKALLEQIPSSIRGGIGQEVAQQVTSHIQLLDSGTVLKAELPTISDRNSELARKQWEDAIQTVCTYALPFSRERARILDPGKYAAEDPRGDRLINIDPMWARVLKGPTVKSLPLLFVSGSSIRIVKLTLPRKHAAGHKHTFTATYLVLPVSREWINSLPGTVQEKVQWWKKPDVLATQELLVGKGALKKSANTLVIPISAGKKRFFNHILPALQRGFPLQWQRIVGRSYRRPATHRKWFAQLTIGYTNPSSLPEMALGIHFGMKDILWWALADKQGNILKDGSIPGNSILDFSLQEKGKIERQQKAGKNVAGKKYGKSLLNATYRVVNGVLEFSKGISAEHASQPIGLGLETIRFVDKASGSSPVNARHSNWNYGQLSGIFANKAGPAGFSVTEITLKKAQRDLSDAEQARVLAIEATKRFASRIKRLATKRKDDTLFV

SEQ ID NO: 76 - protein, 494 aa, Artificial Sequence
  Synthetic polypeptide
VEPVEKERFYYRTYTFRLDGQPRTQNLTTQSGWGLLTKAVLDNTKHYWEIVHHARIANQPIVFENPVIDEQGNPKLNKLGQPRFWKRPISDIVNQLRALFENQNPYQLGSSLIQGTYWDVAENLASWYALNKEYLAGTATWGEPSFPEPHPLTEINQWMPLTFSSGKVVRLLKNASGRYFIGLPILGENNPCYRMRTIEKLIPCDGKGRVTSGSLILFPLVGIYAQQHRRMTDICESIRTEKGKLAWAQVSIDYVREVDKRRRMRRTRKSQGWIQGPWQEVFILRLVLAHKAPKLYKPRCFAGISLGPKTLASCVILDQDERVVEKQQWSGSELLSLIHQGEERLRSLREQSKPTWNAAYRKQLKSLINTQVFTIVTFLRERGAAVRLESIARVRKSTPAPPVNFLLSHWAYRQITERLKDLAIRNGMPLTHSNGSYGVRFTCSQCGATNQGIKDPTKYKVDIESETFLCSICSHREIAAVNTATNLAKQLLDE

SEQ ID NO: 77 - protein, 526 aa, Artificial Sequence
  Synthetic polypeptide
MNDTETSETLTSHRTVCAHLHVVGETGSLPRLVEAALAELITLNGRATQALLSLAKNGLVLRRDKEENLIAAELTLPCRKNKYADVAAKAGEPILATRINNKGKLVTKKWYGEGNSYHIVRFTPETGMFTVRVFDRYAFDEELLHLHSEVVFGSDLPKGIKAKTDSLPANFLQAVFTSFLELPFQGFPDIVVKPAMKQAAEQLLSYVQLEAGENQQAEYPDTNERDPELRLVEWQKSLHELSVRTEPFEFVRARDIDYYAETDRRGNRFVNITPEWTKFAESPFARRLPLKIPPEFCILLRRKTEGHAKIPNRIYLGLQIFDGVTPDSTLGVLATAEDGKLFWWHDHLDEFSNLEGKPEPKLKNKPQLLMVSLEYDREQRFEESVGGDRKICLVTLKETRNFRRGWNGRILGIHFQHNPVITWALMDHDAEVLEKGFIEGNAFLGKALDKQALNEYLQKGGKWVGDRSFGNKLKGITHTLASLIVRLAREKDAWIALEEISWVQKQSADSVANHEIVEQPHHSLTR

SEQ ID NO: 78 - protein, 649 aa, Artificial Sequence
  Synthetic polypeptide
MNDTETSETLTSHRTVCAHLHVVGETGSLPRLVEAALAELITLNGRATQALLSLAKNGLVLRRDKEENLIAAELTLPCRKNKYADVAAKAGEPILATRINNKGKLVTKKWYGEGNSYHIVRFTPETGMFTVRVFDRYAFDEELLHLHSEVVFGSDLPKGIKAKTDSLPANFLQAVFTSFLELPFQGFPDIVVKPAMKQAAEQLLSYVQLEAGENQQAEYPDTNERDPELRLVEWQKSLHELSVRTEPFEFVRARDIDYYAETDRRGNRFVNITPEWTKFAESPFARRLPLKIPPEFCILLRRKTEGHAKIPNRIYLGLQIFDGVTPDSTLGVLATAEDGKLFWWHDHLDEFSNLEGKPEPKLKNKPQLLMVSLEYDREQRFEESVGGDRKICLVTLKETRNFRRGRHGHTRTDRLPAGNTLWRADFATSAEVAAPKWNGRILGIHFQHNPVITWALMDHDAEVLEKGFIEGNAFLGKALDKQALNEYLQKGGKWVGDRSFGNKLKGITHTLASLIVRLAREKDAWIALEEISWVQKQSADSVANRRFSMWNYSRLATLIEWLGTDIATRDCGTAAPLAHKVSDYLTHFTCPECGACRKAGQKKEIADTVRAGDILTCRKCGFSGPIPDNFIAEFVAKKALERMLKKKPV

SEQ ID NO: 79 - protein, 414 aa, Artificial Sequence
  Synthetic polypeptide
MAKRNFGEKSEALYRAVRFEVRPSKEELSILLAVSEVLRMLFNSALAERQQVFTEFIASLYAELKSASVPEEISEIRKKLREAYKEHSISLFDQINALTARRVEDEAFASVTRNWQEETLDALDGAYKSFLSLRRKGDYDAHSPRSRDSGFFQKIPGRSGFKIGEGRIALSCGAGRKLSFPIPDYQQGRLAETTKLKKFELYRDQPNLAKSGRFWISVVYELPKPEATTCQSEQVAFVALGASSIGVVSQRGEEVIALWRSDKHWVPKIEAVEERMKRRVKGSRGWLRLLNSGKRRMHMISSRQHVQDEREIVDYLVRNHGSHFVVTELVVRSKEGKLADSSKPERGGSLGLNWAAQNTGSLSRLVRQLEEKVKEHGGSVRKHKLTLTEAPPARGAENKLWMARKLRESFLKEV

SEQ ID NO: 80 - protein, 413 aa, Artificial Sequence
  Synthetic polypeptide
LAKNDEKELLYQSVKFEIYPDESKIRVLTRVSNILVLVWNSALGERRARFELYIAPLYEELKKFPRKSAESNALRQKIREGYKEHIPTFFDQLKKLLTPMRKEDPALLGSVPRAYQEETLNTLNGSFVSFMTLRRNNDMDAKPPKGRAEDRFHEISGRSGFKIDGSEFVLSTKEQKLRFPIPNYQLEKLKEAKQIKKFTLYQSRDRRFWISIAYEIELPDQRPFNPEEVIYIAFGASSIGVISPEGEKVIDFWRPDKHWKPKIKEVENRMRSCKKGSRAWKKRAAARRKMYAMTQRQQKLNHREIVASLLRLGFHFVVTEYTVRSKPGKLADGSNPKRGGAPQGFNWSAQNTGSFGEFILWLKQKVKEQGGTVQTFRLVLGQSERPEKRGRDNKIEMVRLLREKYLESQTIVV

SEQ ID NO: 81 - protein, 449 aa, Artificial Sequence
  Synthetic polypeptide
MAKGKKKEGKPLYRAVRFEIFPTSDQITLFLRVSKNLQQVWNEAWQERQSCYEQFFGSIYERIGQAKKRAQEAGFSEVWENEAKKGLNKKLRQQEISMQLVSEKESLLQELSIAFQEHGVTLYDQINGLTARRIIGEFALIPRNWQEETLDSLDGSFKSFLALRKNGDPDAKPPRQRVSENSFYKIPGRSGFKVSNGQIYLSFGKIGQTLTSVIPEFQLKRLETAIKLKKFELCRDERDMAKPGRFWISVAYEIPKPEKVPVVSKQITYLAIGASRLGVVSPKGEFCLNLPRSDYHWKPQINALQERLEGVVKGSRKWKKRMAACTRMFAKLGHQQKQHGQYEVVKKLLRHGVHFVVTELKVRSKPGALADASKSDRKGSPTGPNWSAQNTGNIARLIQKLTDKASEHGGTVIKRNPPLLSLEERQLPDAQRKIFIAKKLREEFLADQK

SEQ ID NO: 82 - protein, 711 aa, Artificial Sequence
  Synthetic polypeptide
MAKREKKDDVVLRGTKMRIYPTDRQVTLMDMWRRRCISLWNLLLNLETAAYGAKNTRSKLGWRSIWARVVEENHAKALIVYQHGKCKKDGSFVLKRDGTVKHPPRERFPGDRKILLGLFDALRHTLDKGAKCKCNVNQPYALTRAWLDETGHGARTADIIAWLKDFKGECDCTAISTAAKYCPAPPTAELLTKIKRAAPADDLPVDQAILLDLFGALRGGLKQKECDHTHARTVAYFEKHELAGRAEDILAWLIAHGGTCDCKIVEEAANHCPGPRLFIWEHELAMIMARLKAEPRTEWIGDLPSHAAQTVVKDLVKALQTMLKERAKAAAGDESARKTGFPKFKKQAYAAGSVYFPNTTMFFDVAAGRVQLPNGCGSMRCEIPRQLVAELLERNLKPGLVIGAQLGLLGGRIWRQGDRWYLSCQWERPQPTLLPKTGRTAGVKIAASIVFTTYDNRGQTKEYPMPPADKKLTAVHLVAGKQNSRALEAQKEKEKKLKARKERLRLGKLEKGHDPNALKPLKRPRVRRSKLFYKSAARLAACEAIERDRRDGFLHRVTNEIVHKFDAVSVQKMSVAPMMRRQKQKEKQIESKKNEAKKEDNGAAKKPRNLKPVRKLLRHVAMARGRQFLEYKYNDLRGPGSVLIADRLEPEVQECSRCGTKNPQMKDGRRLLRCIGVLPDGTDCDAVLPRNRNAARNAEKRLRKHREAHNA

SEQ ID NO: 83 - protein, 574 aa, Artificial Sequence
  Synthetic polypeptide
MNEVLPIPAVGEDAADTIMRGSKMRIYPSVRQAATMDLWRRRCIQLWNLLLELEQAAYSGENRRTQIGWRSIWATVVEDSHAEAVRVAREGKKRKDGTFRKAPSGKEIPPLDPAMLAKIQRQMNGAVDVDPKTGEVTPAQPRLFMWEHELQKIMARLKQAPRTHWIDDLPSHAAQSVVKDLIKALQAMLRERKKRASGIGGRDTGFPKFKKNRYAAGSVYFANTQLRFEAKRGKAGDPDAVRGEFARVKLPNGVGWMECRMPRHINAAHAYAQATLMGGRIWRQGENWYLSCQWKMPKPAPLPRAGRTAAIKIAAAIPITTVDNRGQTREYAMPPIDRERIAAHAAAGRAQSRALEARKRRAKKREAYAKKRHAKKLERGIAAKPPGRARIKLSPGFYAAAAKLAKLEAEDANAREAWLHEITTQIVRNFDVIAVPRMEVAKLMKKPEPPEEKEEQVKAPWQGKRRSLKAARVMMRRTAMALIQTTLKYKAVDLRGPQAYEEIAPLDVTAAACSGCGVLKPEWKMARAKGREIMRCQEPLPGGKTCNTVLTYTRNSARVIGRELAVRLAERQKA

SEQ ID NO: 84 - protein, 400 aa, Artificial Sequence
  Synthetic polypeptide
MTTQKTYNFCFYDQRFFELSKEAGEVYSRSLEEFWKIYDETGVWLSKFDLQKHMRNKLERKLLHSDSFLGAMQQVHANLASWKQAKKVVPDACPPRKPKFLQAILFKKSQIKYKNGFLRLTLGTEKEFLYLKWDINIPLPIYGSVTYSKTRGWKINLCLETEVEQKNLSENKYLSIDLGVKRVATIFDGENTITLSGKKFMGLMHYRNKLNGKTQSRLSHKKKGSNNYKKIQRAKRKTTDRLLNIQKEMLHKYSSFIVNYAIRNDIGNIIIGDNSSTHDSPNMRGKTNQKISQNPEQKLKNYIKYKFESISGRVDIVPEPYTSRKCPHCKNIKKSSPKGRTYKCKKCGFIFDRDGVGAINIYNENVSFGQIISPGRIRSLTEPIGMKFHNEIYFKSYVAA

SEQ ID NO: 85 - protein, 743 aa, Artificial Sequence
  Synthetic polypeptide
MSVRSFQARVECDKQTMEHLWRTHKVFNERLPEIIKILFKMKRGECGQNDKQKSLYKSISQSILEANAQNADYLLNSVSIKGWKPGTAKKYRNASFTWADDAAKLSSQGIHVYDKKQVLGDLPGMMSQMVCRQSVEAISGHIELTKKWEKEHNEWLKEKEKWESEDEHKKYLDLREKFEQFEQSIGGKITKRRGRWHLYLKWLSDNPDFAAWRGNKAVINPLSEKAQIRINKAKPNKKNSVERDEFFKANPEMKALDNLHGYYERNFVRRRKTKKNPDGFDHKPTFTLPHPTIHPRWFVFNKPKTNPEGYRKLILPKKAGDLGSLEMRLLTGEKNKGNYPDDWISVKFKADPRLSLIRPVKGRRVVRKGKEQGQTKETDSYEFFDKHLKKWRPAKLSGVKLIFPDKTPKAAYLYFTCDIPDEPLTETAKKIQWLETGDVTKKGKKRKKKVLPHGLVSCAVDLSMRRGTTGFATLCRYENGKIHILRSRNLWVGYKEGKGCHPYRWTEGPDLGHIAKHKREIRILRSKRGKPVKGEESHIDLQKHIDYMGEDRFKKAARTIVNFALNTENAASKNGFYPRADVLLLENLEGLIPDAEKERGINRALAGWNRRHLVERVIEMAKDAGFKRRVFEIPPYGTSQVCSKCGALGRRYSIIRENNRREIRFGYVEKLFACPNCGYCANADHNASVNLNRRFLIEDSFKSYYDWKRLSEKKQKEEIETIESKLMDKLCAMHKISRGSISK

SEQ ID NO: 86 - protein, 769 aa, Artificial Sequence
  Synthetic polypeptide
MHLWRTHCVFNQRLPALLKRLFAMRRGEVGGNEAQRQVYQRVAQFVLARDAKDSVDLLNAVSLRKRSANSAFKKKATISCNGQAREVTGEEVFAEAVALASKGVFAYDKDDMRAGLPDSLFQPLTRDAVACMRSHEELVATWKKEYREWRDRKSEWEAEPEHALYLNLRPKFEEGEAARGGRFRKRAERDHAYLDWLEANPQLAAWRRKAPPAVVPIDEAGKRRIARAKAWKQASVRAEEFWKRNPELHALHKIHVQYLREFVRPRRTRRNKRREGFKQRPTFTMPDPVRHPRWCLFNAPQTSPQGYRLLRLPQSRRTVGSVELRLLTGPSDGAGFPDAWVNVRFKADPRLAQLRPVKVPRTVTRGKNKGAKVEADGFRYYDDQLLIERDAQVSGVKLLFRDIRMAPFADKPIEDRLLSATPYLVFAVEIKDEARTERAKAIRFDETSELTKSGKKRKTLPAGLVSVAVDLDTRGVGFLTRAVIGVPEIQQTHHGVRLLQSRYVAVGQVEARASGEAEWSPGPDLAHIARHKREIRRLRQLRGKPVKGERSHVRLQAHIDRMGEDRFKKAARKIVNEALRGSNPAAGDPYTRADVLLYESLETLLPDAERERGINRALLRWNRAKLIEHLKRMCDDAGIRHFPVSPFGTSQVCSKCGALGRRYSLARENGRAVIRFGWVERLFACPNPECPGRRPDRPDRPFTCNSDHNASVNLHRVFALGDQAVAAFRALAPRDSPARTLAVKRVEDTLRPQLMRVHKLADAGVDSPF

SEQ ID NO: 87 - protein, 666 aa, Artificial Sequence
  Synthetic polypeptide
MATLVYRYGVRAHGSARQQDAVVSDPAMLEQLRLGHELRNALVGVQHRYEDGKRAVWSGFASVAAADHRVTTGETAVAELEKQARAEHSADRTAATRQGTAESLKAARAAVKQARADRKAAMAAVAEQAKPKIQALGDDRDAEIKDLYRRFCQDGVLLPRCGRCAGDLRSDGDCTDCGAAHEPRKLYWATYNAIREDHQTAVKLVEAKRKAGQPARLRFRRWTGDGTLTVQLQRMHGPACRCVTCAEKLTRRARKTDPQAPAVAADPAYPPTDPPRDPALLASGQGKWRNVLQLGTWIPPGEWSAMSRAERRRVGRSHIGWQLGGGRQLTLPVQLHRQMPADADVAMAQLTRVRVGGRHRMSVALTAKLPDPPQVQGLPPVALHLGWRQRPDGSLRVATWACPQPLDLPPAVADVVVSHGGRWGEVIMPARWLADAEVPPRLLGRRDKAMEPVLEALADWLEAHTEACTARMTPALVRRWRSQGRLAGLTNRWRGQPPTGSAEILTYLEAWRIQDKLLWERESHLRRRLAARRDDAWRRVASWLARHAGVLVVDDADIAELRRRDDPADTDPTMPASAAQAARARAALAAPGRLRHLATITATRDGLGVHTVASAGLTRLHRKCGHQAQPDPRYAASAVVTCPGCGNGYDQDYNAAMLMLDRQQQP

SEQ ID NO: 88 - protein, 564 aa, Artificial Sequence
  Synthetic polypeptide
MSRVELHRAYKFRLYPTPAQVAELAEWERQLRRLYNLAHSQRLAAMQRHVRPKSPGVLKSECLSCGAVAVAEIGTDGKAKKTVKHAVGCSVLECRSCGGSPDAEGRTAHTAACSFVDYYRQGREMTQLLEEDDQLARVVCSARQETLRDLEKAWQRWHKMPGFGKPHFKKRIDSCRIYFSTPKSWAVDLGYLSFTGVASSVGRIKIRQDRVWPGDAKFSSCHVVRDVDEWYAVFPLTFTKEIEKPKGGAVGINRGAVHAIADSTGRVVDSPKFYARSLGVIRHRARLLDRKVPFGRAVKPSPTKYHGLPKADIDAAAARVNASPGRLVYEARARGSIAAAEAHLAALVLPAPRQTSQLPSEGRNRERARRFLALAHQRVRRQREWFLHNESAHYAQSYTKIAIEDWSTKEMTSSEPRDAEEMKRVTRARNRSILDVGWYELGRQIAYKSEATGAEFAKVDPGLRETETHVPEAIVRERDVDVSGMLRGEAGISGTCSRCGGLLRASASGHADAECEVCLHVEVGDVNAAVNVLKRAMFPGAAPPSKEKAKVTIGIKGRKKKRAA

SEQ ID NO: 89 - protein, 565 aa, Artificial Sequence
  Synthetic polypeptide
MSRVELHRAYKFRLYPTPVQVAELSEWERQLRRLYNLGHEQRLLTLTRHLRPKSPGVLKGECLSCDSTQVQEVGADGRPKTTVRHAEQCPTLACRSCGALRDAEGRTAHTVACAFVDYYRQGREMTELLAADDQLARVVCSARQEVLRDLDKAWQRWRKMPGFGKPRFKRRTDSCRIYFSTPKAWKLEGGHLSFTGAATTVGAIKMRQDRNWPASVQFSSCHVVRDVDEWYAVFPLTFVAEVARPKGGAVGINRGAVHAIADSTGRVVDSPRYYARALGVIRHRARLFDRKVPSGHAVKPSPTKYRGLSAIEVDRVARATGFTPGRVVTEALNRGGVAYAECALAAIAVLGHGPERPLTSDGRNREKARKFLALAHQRVRRQREWFLHNESAHYARTYSKIAIEDWSTKEMTASEPQGEETRRVTRSRNRSILDVGWYELGRQLAYKTEATGAEFAQVDPGLKETETNVPKAIADARDVDVSGMLRGEAGISGTCSKCGGLLRAPASGHADAECEICLNVEVGDVNAAVNVLKRAMFPGDAPPASGEKPKVSIGIKGRQKKKKAA

SEQ ID NO: 90 - protein, 499 aa, Artificial Sequence
  Synthetic polypeptide
MEAIATGMSPERRVELGILPGSVELKRAYKFRLYPMKVQQAELSEWERQLRRLYNLAHEQRLAALLRYRDWDFQKGACPSCRVAVPGVHTAACDHVDYFRQAREMTQLLEVDAQLSRVICCARQEVLRDLDKAWQRWRKKLGGRPRFKRRTDSCRIYLSTPKHWEIAGRYLRLSGLASSVGEIRIEQDRAFPEGALLSSCSIVRDVDEWYACLPLTFTQPIERAPHRSVGLNRGVVHALADSDGRVVDSPKFFERALATVQKRSRDLARKVSGSRNAHKARIKLAKAHQRVRRQRAAFLHQESAYYSKGFDLVALEDMSVRKMTATAGEAPEMGRGAQRDLNRGILDVGWYELARQIDYKRLAHGGELLRVDPGQTTPLACVTEEQPARGISSACAVCGIPLARPASGNARMRCTACGSSQVGDVNAAENVLTRALSSAPSGPKSPKASIKIKGRQKRLGTPANRAGEASGGDPPVRGPVEGGTLAYVVEPVSESQSDT

SEQ ID NO: 91 - protein, 560 aa, Artificial Sequence
  Synthetic polypeptide
MTVRTYKYRAYPTPEQAEALTSWLRFASQLYNAALEHRKNAWGRHDAHGRGFRFWDGDAAPRKKSDPPGRWVYRGGGGAHISKNDQGKLLTEFRREHAELLPPGMPALVQHEVLARLERSMAAFFQRATKGQKAGYPRWRSEHRYDSLTFGLTSPSKERFDPETGESLGRGKTVGAGTYHNGDLRLTGLGELRILEHRRIPMGAIPKSVIVRRSGKRWFVSIAMEMPSVEPAASGRPAVGLDMGVVTWGTAFTADTSAAAALVADLRRMATDPSDCRRLEELEREAAQLSEVLAHCRARGLDPARPRRCPKELTKLYRRSLHRLGELDRACARIRRRLQAAHDIAEPVPDEAGSAVLIEGSNAGMRHARRVARTQRRVARRTRAGHAHSNRRKKAVQAYARAKERERSARGDHRHKVSRALVRQFEEISVEALDIKQLTVAPEHNPDPQPDLPAHVQRRRNRGELDAAWGAFFAALDYKAADAGGRVARKPAPHTTQECARCGTLVPKPISLRVHRCPACGYTAPRTVNSARNVLQRPLEEPGRAGPSGANGRGVPHAVA

SEQ ID NO: 92 - protein, 404 aa, Artificial Sequence
  Synthetic polypeptide
MNCRYRYRIYPTPGQRQSLARLFGCVRVVWNDALFLCRQSEKLPKNSELQKLCITQAKKTEARGWLGQVSAIPLQQSVADLGVAFKNFFQSRSGKRKGKKVNPPRVKRRNNRQGARFTRGGFKVKTSKVYLARIGDIKIKWSRPLPSEPSSVTVIKDCAGQYFLSFVVEVKPEIKPPKNPSIGIDLGLKTFASCSNGEKIDSPDYSRLYRKLKRCQRRLAKRQRGSKRRERMRVKVAKLNAQIRDKRKDFLHKLSTKVVNENQVIALEDLNVGGMLKNRKLSRAISQAGWYEFRSLCEGKAEKHNRDFRVISRWEPTSQVCSECGYRWGKIDLSVRSIVCINCGVEHDRDDNASVNIEQAGLKVGVGHTHDSKRTGSACKTSNGAVCVEPSTHREYVQLTLFDW

SEQ ID NO: 93 - protein, 392 aa, Artificial Sequence
  Synthetic polypeptide
MKSRWTFRCYPTPEQEQHLARTFGCVRFVWNWALRARTDAFRAGERIGYPATDKALTLLKQQPETVWLNEVSSVCLQQALRDLQVAFSNFFDKRAAHPSFKRKEARQSANYTERGFSFDHERRILKLAKIGAIKVKWSRKAIPHPSSIRLIRTASGKYFVSLVVETQPAPMPETGESVGVDFGVARLATLSNGERISNPKHGAKWQRRLAFYQKRLARATKGSKRRMRIKRHVARIHEKIGNSRSDTLHKLSTDLVTRFDLICVEDLNLRGMVKNHSLARSLHDASIGSAIRMIEEKAERYGKNVVKIDRWFPSSKTCSDCGHIVEQLPLNVREWTCPECGTTHDRDANAAANILAVGQTVSAHGGTVRRSRAKASERKSQRSANRQGVNRA

SEQ ID NO: 94 - protein, 500 aa, Artificial Sequence
  Synthetic polypeptide
KEPLNIGKTAKAVFKEIDPTSLNRAANYDASIELNCKECKFKPFKNVKRYEFNFYNNWYRCNPNSCLQSTYKAQVRKVEIGYEKLKNEILTQMQYYPWFGRLYQNFFHDERDKMTSLDEIQVIGVQNKVFFNTVEKAWREIIKKRFKDNKETMETIPELKHAAGHGKRKLSNKSLLRRRFAFVQKSFKFVDNSDVSYRSFSNNIACVLPSRIGVDLGGVISRNPKREYIPQEISFNAFWKQHEGLKKGRNIEIQSVQYKGETVKRIEADTGEDKAWGKNRQRRFTSLILKLVPKQGGKKVWKYPEKRNEGNYEYFPIPIEFILDSGETSIRFGGDEGEAGKQKHLVIPFNDSKATPLASQQTLLENSRFNAEVKSCIGLAIYANYFYGYARNYVISSIYHKNSKNGQAITAIYLESIAHNYVKAIERQLQNLLLNLRDFSFMESHKKELKKYFGGDLEGTGGAQKRREKEEKIEKEIEQSYLPRLIRLSLTKMVTKQVEM

SEQ ID NO: 95 - protein, 507 aa, Artificial Sequence
  Synthetic polypeptide
ELIVNENKDPLNIGKTAKAVFKEIDPTSINRAANYDASIELACKECKFKPFNNTKRHDFSFYSNWHRCSPNSCLQSTYRAKIRKTEIGYEKLKNEILNQMQYYPWFGRLYQNFFNDQRDKMTSLDEIQVTGVQNKIFFNTVEKAWREIIKKRFRDNKETMRTIPDLKNKSGHGSRKLSNKSLLRRRFAFAQKSFKLVDNSDVSYRAFSNNVACVLPSKIGVDIGGIINKDLKREYIPQEITFNVFWKQHDGLKKGRNIEIHSVQYKGEIVKRIEADTGEDKAWGKNRQRRFTSLILKITPKQGGKKIWKFPEKKNASDYEYFPIPIEFILDNGDASIKFGGEEGEVGKQKHLLIPFNDSKATPLSSKQMLLETSRFNAEVKSTIGLALYANYFVSYARNYVIKSTYHKNSKKGQIVTEIYLESISQNFVRAIQRQLQSLMLNLKDWGFMQTHKKELKKYFGSDLEGSKGGQKRREKEEKIEKEIEASYLPRLIRLSLTKSVTKAEEM

SEQ ID NO: 96 - protein, 529 aa, Artificial Sequence
  Synthetic polypeptide
PEEKTSKLKPNSINLAANYDANEKFNCKECKFHPFKNKKRYEFNFYNNLHGCKSCTKSTNNPAVKRIEIGYQKLKFEIKNQMEAYPWFGRLRINFYSDEKRKMSELNEMQVTGVKNKIFFDAIECAWREILKKRFRESKETLITIPKLKNKAGHGARKHRNKKLLIRRRAFMKKNFHFLDNDSISYRSFANNIACVLPSKVGVDIGGIISPDVGKDIKPVDISLNLMWASKEGIKSGRKVEIYSTQYDGNMVKKIEAETGEDKSWGKNRKRRQTSLLLSIPKPSKQVQEFDFKEWPRYKDIEKKVQWRGFPIKIIFDSNHNSIEFGTYQGGKQKVLPIPFNDSKTTPLGSKMNKLEKLRFNSKIKSRLGSAIAANKFLEAARTYCVDSLYHEVSSANAIGKGKIFIEYYLEILSQNYIEAAQKQLQRFIESIEQWFVADPFQGRLKQYFKDDLKRAKCFLCANREVQTTCYAAVKLHKSCAEKVKDKNKELAIKERNNKEDAVIKEVEASNYPRVIRLKLTKTITNKAM

SEQ ID NO: 97 - protein, 726 aa, Artificial Sequence
  Synthetic polypeptide
SESENKIIEQYYAFLYSFRDKYEKPEFKNRGDIKRKLQNKWEDFLKEQNLKNDKKLSNYIFSNRNFRRSYDREEENEEGIDEKKSKPKRINCFEKEKNLKDQYDKDAINASANKDGAQKWGCFECIFFPMYKIESGDPNKRIIINKTRFKLFDFYLNLKGCKSCLRSTYHPYRSNVYIESNYDKLKREIGNFLQQKNIFQRMRKAKVSEGKYLTNLDEYRLSCVAMHFKNRWLFFDSIQKVLRETIKQRLKQMRESYDEQAKTKRSKGHGRAKYEDQVRMIRRRAYSAQAHKLLDNGYITLFDYDDKEINKVCLTAINQEGFDIGGYLNSDIDNVMPPIEISFHLKWKYNEPILNIESPFSKAKISDYLRKIREDLNLERGKEGKARSKKNVRRKVLASKGEDGYKKIFTDFFSKWKEELEGNAMERVLSQSSGDIQWSKKKRIHYTTLVLNINLLDKKGVGNLKYYEIAEKTKILSFDKNENKFWPITIQVLLDGYEIGTEYDEIKQLNEKTSKQFTIYDPNTKIIKIPFTDSKAVPLGMLGINIATLKTVKKTERDIKVSKIFKGGLNSKIVSKIGKGIYAGYFPTVDKEILEEVEEDTLDNEFSSKSQRNIFLKSIIKNYDKMLKEQLFDFYSFLVRNDLGVRFLTDRELQNIEDESFNLEKRFFETDRDRIARWFDNTNTDDGKEKFKKLANEIVDSYKPRLIRLPVVRVIKRIQPVKQREM

SEQ ID NO: 98 - protein, 517 aa, Artificial Sequence
  Synthetic polypeptide
KYSTRDFSELNEIQVTACKQDEFFKVIQNAWREIIKKRFLENRENFIEKKIFKNKKGRGKRQESDKTIQRNRASVMKNFQLIENEKIILRAPSGHVACVFPVKVGLDIGGFKTDDLEKNIFPPRTITINVFWKNRDRQRKGRKLEVWGIKARTKLIEKVHKWDKLEEVKKKRLKSLEQKQEKSLDNWSEVNNDSFYKVQIDELQEKIDKSLKGRTMNKILDNKAKESKEAEGLYIEWEKDFEGEMLRRIEASTGGEEKWGKRRQRRHTSLLLDIKNNSRGSKEIINFYSYAKQGKKEKKIEFFPFPLTITLDAEEESPLNIKSIPIEDKNATSKYFSIPFTETRATPLSILGDRVQKFKTKNISGAIKRNLGSSISSCKIVQNAETSAKSILSLPNVKEDNNMEIFINTMSKNYFRAMMKQMESFIFEMEPKTLIDPYKEKAIKWFEVAASSRAKRKLKKLSKADIKKSELLLSNTEEFEKEKQEKLEALEKEIEEFYLPRIVRLQLTKTILETPVM

SEQ ID NO: 99 - protein, 481 aa, Artificial Sequence
  Synthetic polypeptide
KKLQLLGHKILLKEYDPNAVNAAANFETSTAELCGQCKMKPFKNKRRFQYTFGKNYHGCLSCIQNVYYAKKRIVQIAKEELKHQLTDSIASIPYKYTSLFSNTNSIDELYILKQERAAFFSNTNSIDELYITGIENNIAFKVISAIWDEIIKKRRQRYAESLTDTGTVKANRGHGGTAYKSNTRQEKIRALQKQTLHMVTNPYISLARYKNNYIVATLPRTIGMHIGAIKDRDPQKKLSDYAINFNVFWSDDRQLIELSTVQYTGDMVRKIEAETGENNKWGENMKRTKTSLLLEILTKKTTDELTFKDWAFSTKKEIDSVTKKTYQGFPIGIIFEGNESSVKFGSQNYFPLPFDAKITPPTAEGFRLDWLRKGSFSSQMKTSYGLAIYSNKVTNAIPAYVIKNMFYKIARAENGKQIKAKFLKKYLDIAGNNYVPFIIMQHYRVLDTFEEMPISQPKVIRLSLTKTQHIIIKKDKTDSKM

SEQ ID NO: 100 - protein, 534 aa, Artificial Sequence
  Synthetic polypeptide
NTSNLINLGKKAINISANYDANLEVGCKNCKFLSSNGNFPRQTNVKEGCHSCEKSTYEPSIYLVKIGERKAKYDVLDSLKKFTFQSLKYQSKKSMKSRNKKPKELKEFVIFANKNKAFDVIQKSYNHLILQIKKEINRMNSKKRKKNHKRRLFRDREKQLNKLRLIESSNLFLPRENKGNNHVFTYVAIHSVGRDIGVIGSYDEKLNFETELTYQLYFNDDKRLLYAYKPKQNKIIKIKEKLWNLRKEKEPLDLEYEKPLNKSITFSIKNDNLFKVSKDLMLRRAKFNIQGKEKLSKEERKINRDLIKIKGLVNSMSYGRFDELKKEKNIWSPHIYREVRQKEIKPCLIKNGDRIEIFEQLKKKMERLRRFREKRQKKISKDLIFAERIAYNFHTKSIKNTSNKINIDQEAKRGKASYMRKRIGYETFKNKYCEQCLSKGNVYRNVQKGCSCFENPFDWIKKGDENLLPKKNEDLRVKGAFRDEALEKQIVKIAFNIAKGYEDFYDNLGESTEKDLKLKFKVGTTINEQESLKL

SEQ ID NO: 101 - protein, 537 aa, Artificial Sequence
  Synthetic polypeptide
TSNPIKLGKKAINISANYDSNLQIGCKNCKFLSYNGNFPRQTNVKEGCHSCEKSTYEPPVYTVRIGERRSKYDVLDSLKKFIFLSLKYRQSKKMKTRSKGIRGLEEFVISANLKKAMDVIQKSYRHLILNIKNEIVRMNGKKRNKNHKRLLFRDREKQLNKLRLIEGSSFFKPPTVKGDNSIFTCVAIHNIGRDIGIAGDYFDKLEPKIELTYQLYYEYNPKKESEINKRLLYAYKPKQNKIIEIKEKLWNLRKEKSPLDLEYEKPLTKSITFLVKRDGVFRISKDLMLRKAKFIIQGKEKLSKEERKINRDLIKIKSNIISLTYGRFDELKKDKTIWSPHIFRDVKQGKITPCIERKGDRMDIFQQLRKKSERLRENRKKRQKKISKDLIFAERIAYNFHTKSIKNTSNLINIKHEAKRGKASYMRKRIGNETFRIKYCEQCFPKNNVYKNVQKGCSCFEDPFEYIKKGNEDLIPNKNQDLKAKGAFRDDALEKQIIKVAFNIAKGYEDFYENLKKTTEKDIRLKFKVGTIISEEM

SEQ ID NO: 102 - protein, 541 aa, Artificial Sequence
  Synthetic polypeptide
NNSINLSKKAINISANYDANLQVRCKNCKFLSSNGNFPRQTDVKEGCHSCEKSTYEPPVYDVKIGEIKAKYEVLDSLKKFTFQSLKYQLSKSMKFRSKKIKELKEFVIFAKESKALNVINRSYKHLILNIKNDINRMNSKKRIKNHKGRLFLDRQKQLSKLKLIEGSSFFVPAKNVGNKSVFTCVAIHSIGRDIGIAGLYDSFTKPVNEITYQIFFSGERRLLYAYKPKQLKILSIKENLWSLKNEKKPLDLLYEKPLGKNLNFNVKGGDLFRVSKDLMIRNAKFNVHGRQRLSDEERLINRNFIKIKGEVVSLSYGRFEELKKDRKLWSPHIFKDVRQNKIKPCLVMQGQRIDIFEQLKRKLELLKKIRKSRQKKLSKDLIFGERIAYNFHTKSIKNTSNKINIDSDAKRGRASYMRKRIGNETFKLKYCDVCFPKANVYRRVQNGCSCSENPYNYIKKGDKDLLPKKDEGLAIKGAFRDEKLNKQIIKVAFNIAKGYEDFYDDLKKRTEKDVDLKFKIGTTVLDQKPMEIFDGIVITWL

SEQ ID NO: 103 - protein, 542 aa, Artificial Sequence
  Synthetic polypeptide
LLTTVVETNNLAKKAINVAANFDANIDRQYYRCTPNLCRFIAQSPRETKEKDAGCSSCTQSTYDPKVYVIKIGKLLAKYEILKSLKRFLFMNRYFKQKKTERAQQKQKIGTELNEMSIFAKATNAMEVIKRATKHCTYDIIPETKSLQMLKRRRHRVKVRSLLKILKERRMKIKKIPNTFIEIPKQAKKNKSDYYVAAALKSCGIDVGLCGAYEKNAEVEAEYTYQLYYEYKGNSSTKRILYCYNNPQKNIREFWEAFYIQGSKSHVNTPGTIRLKMEKFLSPITIESEALDFRVWNSDLKIRNGQYGFIKKRSLGKEAREIKKGMGDIKRKIGNLTYGKSPSELKSIHVYRTERENPKKPRAARKKEDNFMEIFEMQRKKDYEVNKKRRKEATDAAKIMDFAEEPIRHYHTNNLKAVRRIDMNEQVERKKTSVFLKRIMQNGYRGNYCRKCIKAPEGSNRDENVLEKNEGCLDCIGSEFIWKKSSKEKKGLWHTNRLLRRIRLQCFTTAKAYENFYNDLFEKKESSLDIIKLKVSITTKSM

SEQ ID NO: 104 - protein, 564 aa, Artificial Sequence
  Synthetic polypeptide
ASTMNLAKQAINFAANYDSNLEIGCKGCKFMSTWSKKSNPKFYPRQNNQANKCHSCTYSTGEPEVPIIEIGERAAKYKIFTALKKFVFMSVAYKERRRQRFKSKKPKELKELAICSNREKAMEVIQKSVVHCYGDVKQEIPRIRKIKVLKNHKGRLFYKQKRSKIKIAKLEKGSFFKTFIPKVHNNGCHSCHEASLNKPILVTTALNTIGADIGLINDYSTIAPTETDISWQVYYEFIPNGDSEAVKKRLLYFYKPKGALIKSIRDKYFKKGHENAVNTGFFKYQGKIVKGPIKFVNNELDFARKPDLKSMKIKRAGFAIPSAKRLSKEDREINRESIKIKNKIYSLSYGRKKTLSDKDIIKHLYRPVRQKGVKPLEYRKAPDGFLEFFYSLKRKERRLRKQKEKRQKDMSEIIDAADEFAWHRHTGSIKKTTNHINFKSEVKRGKVPIMKKRIANDSFNTRHCGKCVKQGNAINKYYIEKQKNCFDCNSIEFKWEKAALEKKGAFKLNKRLQYIVKACFNVAKAYESFYEDFRKGEEESLDLKFKIGTTTTLKQYPQNKARAM

SEQ ID NO: 105 - protein, 610 aa, Artificial Sequence
  Synthetic polypeptide
HSHNLMLTKLGKQAINFAANYDANLEIGCKNCKFLSYSPKQANPKKYPRQTDVHEDGNIACHSCMQSTKEPPVYIVPIGERKSKYEILTSLNKFTFLALKYKEKKRQAFRAKKPKELQELAIAFNKEKAIKVIDKSIQHLILNIKPEIARIQRQKRLKNRKGKLLYLHKRYAIKMGLIKNGKYFKVGSPKKDGKKLLVLCALNTIGRDIGIIGNIEENNRSETEITYQLYFDCLDANPNELRIKEIEYNRLKSYERKIKRLVYAYKPKQTKILEIRSKFFSKGHENKVNTGSFNFENPLNKSISIKVKNSAFDFKIGAPFIMLRNGKFHIPTKKRLSKEEREINRTLSKIKGRVFRLTYGRNISEQGSKSLHIYRKERQHPKLSLEIRKQPDSFIDEFEKLRLKQNFISKLKKQRQKKLADLLQFADRIAYNYHTSSLEKTSNFINYKPEVKRGRTSYIKKRIGNEGFEKLYCETCIKSNDKENAYAVEKEELCFVCKAKPFTWKKTNKDKLGIFKYPSRIKDFIRAAFTVAKSYNDFYENLKKKDLKNEIFLKFKIGLILSHEKKNHISIAKSVAEDERISGKSIKNILNKSIKLEKNCYSCFFHKEDM

SEQ ID NO: 106 - protein, 552 aa, Artificial Sequence
  Synthetic polypeptide
SLERVIDKRNLAKKAINIAANFDANINKGFYRCETNQCMFIAQKPRKTNNTGCSSCLQSTYDPVIYVVKVGEMLAKYEILKSLKRFVFMNRSFKQKKTEKAKQKERIGGELNEMSIFANAALAMGVIKRAIRHCHVDIRPEINRLSELKKTKHRVAAKSLVKIVKQRKTKWKGIPNSFIQIPQKARNKDADFYVASALKSGGIDIGLCGTYDKKPHADPRWTYQLYFDTEDESEKRLLYCYNDPQAKIRDFWKTFYERGNPSMVNSPGTIEFRMEGFFEKMTPISIESKDFDFRVWNKDLLIRRGLYEIKKRKNLNRKAREIKKAMGSVKRVLANMTYGKSPTDKKSIPVYRVEREKPKKPRAVRKEENELADKLENYRREDFLIRNRRKREATEIAKIIDAAEPPIRHYHTNHLRAVKRIDLSKPVARKNTSVFLKRIMQNGYRGNYCKKCIKGNIDPNKDECRLEDIKKCICCEGTQNIWAKKEKLYTGRINVLNKRIKQMKLECFNVAKAYENFYDNLAALKEGDLKVLKLKVSIPALNPEASDPEEDM

SEQ ID NO: 107 - protein, 534 aa, Artificial Sequence
  Synthetic polypeptide
NASINLGKRAINLSANYDSNLVIGCKNCKFLSFNGNFPRQTNVREGCHSCDKSTYAPEVYIVKIGERKAKYDVLDSLKKFTFQSLKYQIKKSMRERSKKPKELLEFVIFANKDKAFNVIQKSYEHLILNIKQEINRMNGKKRIKNHKKRLFKDREKQLNKLRLIGSSSLFFPRENKGDKDLFTYVAIHSVGRDIGVAGSYESHIEPISDLTYQLFINNEKRLLYAYKPKQNKIIELKENLWNLKKEKKPLDLEFTKPLEKSITFSVKNDKLFKVSKDLMLRQAKFNIQGKEKLSKEERQINRDFSKIKSNVISLSYGRFEELKKEKNIWSPHIYREVKQKEIKPCIVRKGDRIELFEQLKRKMDKLKKFRKERQKKISKDLNFAERIAYNFHTKSIKNTSNKINIDQEAKRGKASYMRKRIGNESFRKKYCEQCFSVGNVYHNVQNGCSCFDNPIELIKKGDEGLIPKGKEDRKYKGALRDDNLQMQIIRVAFNIAKGYEDFYNNLKEKTEKDLKLKFKIGTTISTQESNNKEM

SEQ ID NO: 108 - protein, 577 aa, Artificial Sequence
  Synthetic polypeptide
SNLIKLGKQAINFAANYDANLEVGCKNCKFLSSTNKYPRQTNVHLDNKMACRSCNQSTMEPAIYIVRIGEKKAKYDIYNSLTKFNFQSLKYKAKRSQRFKPKQPKELQELSIAVRKEKALDIIQKSIDHLIQDIRPEIPRIKQQKRYKNHVGKLFYLQKRRKNKLNLIGKGSFFKVFSPKEKKNELLVICALTNIGRDIGLIGNYNTIINPLFEVTYQLYYDYIPKKNNKNVQRRLLYAYKSKNEKILKLKEAFFKRGHENAVNLGSFSYEKPLEKSLTLKIKNDKDDFQVSPSLRIRTGRFFVPSKRNLSRQEREINRRLVKIKSKIKNMTYGKFETARDKQSVHIFRLERQKEKLPLQFRKDEKEFMEEFQKLKRRTNSLKKLRKSRQKKLADLLQLSEKVVYNNHTGTLKKTSNFLNFSSSVKRGKTAYIKELLGQEGFETLYCSNCINKGQKTRYNIETKEKCFSCKDVPFVWKKKSTDKDRKGAFLFPAKLKDVIKATFTVAKAYEDFYDNLKSIDEKKPYIKFKIGLILAHVRHEHKARAKEEAGQKNIYNKPIKIDKNCKECFFFKEEAM

SEQ ID NO: 109 - protein, 613 aa, Artificial Sequence
  Synthetic polypeptide
NTTRKKFRKRTGFPQSDNIKLAYCSAIVRAANLDADIQKKHNQCNPNLCVGIKSNEQSRKYEHSDRQALLCYACNQSTGAPKVDYIQIGEIGAKYKILQMVNAYDFLSLAYNLTKLRNGKSRGHQRMSQLDEVVIVADYEKATEVIKRSINHLLDDIRGQLSKLKKRTQNEHITEHKQSKIRRKLRKLSRLLKRRRWKWGTIPNPYLKNWVFTKKDPELVTVALLHKLGRDIGLVNRSKRRSKQKLLPKVGFQLYYKWESPSLNNIKKSKAKKLPKRLLIPYKNVKLFDNKQKLENAIKSLLESYQKTIKVEFDQFFQNRTEEIIAEEQQTLERGLLKQLEKKKNEFASQKKALKEEKKKIKEPRKAKLLMEESRSLGFLMANVSYALFNTTIEDLYKKSNVVSGCIPQEPVVVFPADIQNKGSLAKILFAPKDGFRIKFSGQHLTIRTAKFKIRGKEIKILTKTKREILKNIEKLRRVWYREQHYKLKLFGKEVSAKPRFLDKRKTSIERRDPNKLADQTDDRQAELRNKEYELRHKQHKMAERLDNIDTNAQNLQTLSFWVGEADKPPKLDEKDARGFGVRTCISAWKWFMEDLLKKQEEDPLLKLKLSIM

SEQ ID NO: 110 - protein, 615 aa, Artificial Sequence
  Synthetic polypeptide
PKKPKFQKRTGFPQPDNLRKEYCLAIVRAANLDADFEKKCTKCEGIKTNKKGNIVKGRTYNSADKDNLLCYACNISTGAPAVDYVFVGALEAKYKILQMVKAYDFHSLAYNLAKLWKGRGRGHQRMGGLNEVVIVSNNEKALDVIEKSLNHFHDEIRGELSRLKAKFQNEHLHVHKESKLRRKLRKISRLLKRRRWKWDVIPNSYLRNFTFTKTRPDFISVALLHRVGRDIGLVTKTKIPKPTDLLPQFGFQIYYTWDEPKLNKLKKSRLRSEPKRLLVPYKKIELYKNKSVLEEAIRHLAEVYTEDLTICFKDFFETQKRKFVSKEKESLKRELLKELTKLKKDFSERKTALKRDRKEIKEPKKAKLLMEESRSLGFLAANTSYALFNLIAADLYTKSKKACSTKLPRQLSTILPLEIKEHKSTTSLAIKPEEGFKIRFSNTHLSIRTPKFKMKGADIKALTKRKREILKNATKLEKSWYGLKHYKLKLYGKEVAAKPRFLDKRNPSIDRRDPKELMEQIENRRNEVKDLEYEIRKGQHQMAKRLDNVDTNAQNLQTKSFWVGEADKPPELDSMEAKKLGLRTCISAWKWFMKDLVLLQEKSPNLKLKLSLTEM

SEQ ID NO: 111 - protein, 775 aa, Artificial Sequence
  Synthetic polypeptide
KFSKRQEGFLIPDNIDLYKCLAIVRSANLDADVQGHKSCYGVKKNGTYRVKQNGKKGVKEKGRKYVFDLIAFKGNIEKIPHEAIEEKDQGRVIVLGKFNYKLILNIEKNHNDRASLEIKNKIKKLVQISSLETGEFLSDLLSGKIGIDEVYGIIEPDVFSGKELVCKACQQSTYAPLVEYMPVGELDAKYKILSAIKGYDFLSLAYNLSRNRANKKRGHQKLGGGELSEVVISANYDKALNVIKRSINHYHVEIKPEISKLKKKMQNEPLKVMKQARIRRELHQLSRKVKRLKWKWGMIPNPELQNIIFEKKEKDFVSYALLHTLGRDIGLFKDTSMLQVPNISDYGFQIYYSWEDPKLNSIKKIKDLPKRLLIPYKRLDFYIDTILVAKVIKNLIELYRKSYVYETFGEEYGYAKKAEDILFDWDSINLSEGIEQKIQKIKDEFSDLLYEARESKRQNFVESFENILGLYDKNFASDRNSYQEKIQSMIIKKQQENIEQKLKREFKEVIERGFEGMDQNKKYYKVLSPNIKGGLLYTDTNNLGFFRSHLAFMLLSKISDDLYRKNNLVSKGGNKGILDQTPETMLTLEFGKSNLPNISIKRKFFNIKYNSSWIGIRKPKFSIKGAVIREITKKVRDEQRLIKSLEGVWHKSTHFKRWGKPRFNLPRHPDREKNNDDNLMESITSRREQIQLLLREKQKQQEKMAGRLDKIDKEIQNLQTANFQIKQIDKKPALTEKSEGKQSVRNALSAWKWFMEDLIKYQKRTPILQLKLAKM

SEQ ID NO: 112 - protein, 777 aa, Artificial Sequence
  Synthetic polypeptide
KFSKRQEGFVIPENIGLYKCLAIVRSANLDADVQGHVSCYGVKKNGTYVLKQNGKKSIREKGRKYASDLVAFKGDIEKIPFEVIEEKKKEQSIVLGKFNYKLVLDVMKGEKDRASLTMKNKSKKLVQVSSLGTDEFLLTLLNEKFGIEEIYGIIEPEVFSGKKLVCKACQQSTYAPLVEYMPVGELDSKYKILSAIKGYDFLSLAYNLARHRSNKKRGHQKLGGGELSEVVISANNAKALNVIKRSLNHYYSEIKPEISKLRKKMQNEPLKVGKQARMRRELHQLSRKVKRLKWKWGKIPNLELQNITFKESDRDFISYALLHTLGRDIGMFNKTEIKMPSNILGYGFQIYYDWEEPKLNTIKKSKNTPKRILIPYKKLDFYNDSILVARAIKELVGLFQESYEWEIFGNEYNYAKEAEVELIKLDEESINGNVEKKLQRIKENFSNLLEKAREKKRQNFIESFESIARLYDESFTADRNEYQREIQSFIIEKQKQSIEKKLKNEFKKIVEKKFNEQEQGKKHYRVLNPTIINEFLPKDKNNLGFLRSKIAFILLSKISDDLYKKSNAVSKGGEKGIIKQQPETILDLEFSKSKLPSINIKKKLFNIKYTSSWLGIRKPKFNIKGAKIREITRRVRDVQRTLKSAESSWYASTHFRRWGFPRFNQPRHPDKEKKSDDRLIESITLLREQIQILLREKQKGQKEMAGRLDDVDKKIQNLQTANFQIKQTGDKPALTEKSAGKQSFRNALSAWKWFMENLLKYQNKTPDLKLKIARTVM

SEQ ID NO: 113 - protein, 610 aa, Artificial Sequence
  Synthetic polypeptide
KWIEPNNIDFNKCLAITRSANLDADVQGHKMCYGIKTNGTYKAIGKINKKHNTGIIEKRRTYVYDLIVTKEKNEKIVKKTDFMAIDEEIEFDEKKEKLLKKYIKAEVLGTGELIRKDLNDGEKFDDLCSIEEPQAFRRSELVCKACNQSTYASDIRYIPIGEIEAKYKILKAIKGYDFLSLKYNLGRLRDSKKRGHQKMGQGELKEFVICANKEKALDVIKRSLNHYLNEVKDEISRLNKKMQNEPLKVNDQARWRRELNQISRRLKRLKWKWGEIPNPELKNLIFKSSRPEFVSYALIHTLGRDIGLINETELKPNNIQEYGFQIYYKWEDPELNHIKKVKNIPKRFIIPYKNLDLFGKYTILSRAIEGILKLYSSSFQYKSFKDPNLFAKEGEKKITNEDFELGYDEKIKKIKDDFKSYKKALLEKKKNTLEDSLNSILSVYEQSLLTEQINNVKKWKEGLLKSKESIHKQKKIENIEDIISRIEELKNVEGWIRTKERDIVNKEETNLKREIKKELKDSYYEEVRKDFSDLKKGEESEKKPFREEPKPIVIKDYIKFDVLPGENSALGFFLSHLSFNLFDSIQYELFEKSRLSSSKHPQIPETILDL

SEQ ID NO: 114 - protein, 632 aa, Artificial Sequence
  Synthetic polypeptide
FRKFVKRSGAPQPDNLNKYKCIAIVRAANLDADIMSNESSNCVMCKGIKMNKRKTAKGAAKTTELGRVYAGQSGNLLCTACTKSTMGPLVDYVPIGRIRAKYTILRAVKEYDFLSLAYNLARTRVSKKGGRQKMHSLSELVIAAEYEIAWNIIKSSVIHYHQETKEEISGLRKKLQAEHIHKNKEARIRREMHQISRRIKRLKWKWHMIPNSELHNFLFKQQDPSFVAVALLHTLGRDIGMINKPKGSAKREFIPEYGFQIYYKWMNPKLNDINKQKYRKMPKRSLIPYKNLNVFGDRELIENAMHKLLKLYDENLEVKGSKFFKTRVVAISSKESEKLKRDLLWKGELAKIKKDFNADKNKMQELFKEVKEPKKANALMKQSRNMGFLLQNISYGALGLLANRMYEASAKQSKGDATKQPSIVIPLEMEFGNAFPKLLLRSGKFAMNVSSPWLTIRKPKFVIKGNKIKNITKLMKDEKAKLKRLETSYHRATHFRPTLRGSIDWDSPYFSSPKQPNTHRRSPDRLSADITEYRGRLKSVEAELREGQRAMAKKLDSVDMTASNLQTSNFQLEKGEDPRLTEIDEKGRSIRNCISSWKKFMEDLMKAQEANPVIKIKIALKDESSVLSEDSM

SEQ ID NO: 115 - protein, 625 aa, Artificial Sequence
  Synthetic polypeptide
KFHPENLNKSYCLAIVRAANLDADIQGHINCIGIKSNKSDRNYENKLESLQNVELLCKACTKSTYKPNINSVPVGEKKAKYSILSEIKKYDFNSLVYNLKKYRKGKSRGHQKLNELRELVITSEYKKALDVINKSVNHYLVNIKNKMSKLKKILQNEHIHVGTLARIRRERNRISRKLDHYRKKWKFVPNKILKNYVFKNQSPDFVSVALLHKLGRDIGLITKTAILQKSFPEYSLQLYYKYDTPKLNYLKKSKFKSLPKRILISYKYPKFDINSNYIEESIDKLLKLYEESPIYKNNSKIIEFFKKSEDNLIKSENDSLKRGIMKEFEKVTKNFSSKKKKLKEELKLKNEDKNSKMLAKVSRPIGFLKAYLSYMLFNIISNRIFEFSRKSSGRIPQLPSCIINLGNQFENFKNELQDSNIGSKKNYKYFCNLLLKSSGFNISYEEEHLSIKTPNFFINGRKLKEITSEKKKIRKENEQLIKQWKKLTFFKPSNLNGKKTSDKIRFKSPNNPDIERKSEDNIVENIAKVKYKLEDLLSEQRKEFNKLAKKHDGVDVEAQCLQTKSFWIDSNSPIKKSLEKKNEKVSVKKKMKAIRSCISAWKWFMADLIEAQKETPMIKLKLALM

SEQ ID NO: 116 - protein, 517 aa, Artificial Sequence
  Synthetic polypeptide
TTLVPSHLAGIEVMDETTSRNEDMIQKETSRSNEDENYLGVKNKCGINVHKSGRGSSKHEPNMPPEKSGEGQMPKQDSTEMQQRFDESVTGETQVSAGATASIKTDARANSGPRVGTARALIVKASNLDRDIKLGCKPCEYIRSELPMGKKNGCNHCEKSSDIASVPKVESGFRKAKYELVRRFESFAADSISRHLGKEQARTRGKRGKKDKKEQMGKVNLDEIAILKNESLIEYTENQILDARSNRIKEWLRSLRLRLRTRNKGLKKSKSIRRQLITLRRDYRKWIKPNPYRPDEDPNENSLRLHTKLGVDIGVQGGDNKRMNSDDYETSFSITWRDTATRKICFTKPKGLLPRHMKFKLRGYPELILYNEELRIQDSQKFPLVDWERIPIFKLRGVSLGKKKVKALNRITEAPRLVVAKRIQVNIESKKKKVLTRYVYNDKSINGRLVKAEDSNKDPLLEFKKQAEEINSDAKYYENQEIAKNYLWGCEGLHKNLLEEQTKNPYLAFKYGFLNIV

SEQ ID NO: 117 - protein, 410 aa, Artificial Sequence
  Synthetic polypeptide
LDFKRTCSQELVLLPEIEGLKLSGTQGVTSLAKKLINKAANVDRDESYGCHHCIHTRTSLSKPVKKDCNSCNQSTNHPAVPITLKGYKIAFYELWHRFTSWAVDSISKALHRNKVMGKVNLDEYAVVDNSHIVCYAVRKCYEKRQRSVRLHKRAYRCRAKHYNKSQPKVGRIYKKSKRRNARNLKKEAKRYFQPNEITNGSSDALFYKIGVDLGIAKGTPETEVKVDVSICFQVYYGDARRVLRVRKMDELQSFHLDYTGKLKLKGIGNKDTFTIAKRNESLKWGSTKYEVSRAHKKFKPFGKKGSVKRKCNDYFRSIASWSCEAASQRAQSNLKNAFPYQKALVKCYKNLDYKGVKKNDMWYRLCSNRIFRYSRIAEDIAQYQSDKGKAKFEFVILAQSVAEYDISAIM

SEQ ID NO: 118 - protein, 602 aa, Artificial Sequence
  Synthetic polypeptide
VFLTDDKRKTALRKIRSAFRKTAEIALVRAQEADSLDRQAKKLTIETVSFGAPGAKNAFIGSLQGYNWNSHRANVPSSGSAKDVFRITELGLGIPQSAHEASIGKSFELVGNVVRYTANLLSKGYKKGAVNKGAKQQREIKGKEQLSFDLISNGPISGDKLINGQKDALAWWLIDKMGFHIGLAMEPLSSPNTYGITLQAFWKRHTAPRRYSRGVIRQWQLPFGRQLAPLIHNFFRKKGASIPIVLTNASKKLAGKGVLLEQTALVDPKKWWQVKEQVTGPLSNIWERSVPLVLYTATFTHKHGAAHKRPLTLKVIRISSGSVFLLPLSKVTPGKLVRAWMPDINILRDGRPDEAAYKGPDLIRARERSFPLAYTCVTQIADEWQKRALESNRDSITPLEAKLVTGSDLLQIHSTVQQAVEQGIGGRISSPIQELLAKDALQLVLQQLFMTVDLLRIQWQLKQEVADGNTSEKAVGWAIRISNIHKDAYKTAIEPCTSALKQAWNPLSGFEERTFQLDASIVRKRSTAKTPDDELVIVLRQQAAEMTVAVTQSVSKELMELAVRHSATLHLLVGEVASKQLSRSADKDRGAMDHWKLLSQSM

SEQ ID NO: 119 - protein, 494 aa, Artificial Sequence
  Synthetic polypeptide
EDLLQKALNTATNVAAIERHSCISCLFTESEIDVKYKTPDKIGQNTAGCQSCTFRVGYSGNSHTLPMGNRIALDKLRETIQRYAWHSLLFNVPPAPTSKRVRAISELRVAAGRERLFTVITFVQTNILSKLQKRYAANWTPKSQERLSRLREEGQHILSLLESGSWQQKEVVREDQDLIVCSALTKPGLSIGAFCRPKYLKPAKHALVLRLIFVEQWPGQIWGQSKRTRRMRRRKDVERVYDISVQAWALKGKETRISECIDTMRRHQQAYIGVLPFLILSGSTVRGKGDCPILKEITRMRYCPNNEGLIPLGIFYRGSANKLLRVVKGSSFTLPMWQNIETLPHPEPFSPEGWTATGALYEKNLAYWSALNEAVDWYTGQILSSGLQYPNQNEFLARLQNVIDSIPRKWFRPQGLKNLKPNGQEDIVPNEFVIPQNAIRAHHVIEWYHKTNDLVAKTLLGWGSQTTLNQTRPQGDLRFTYTRYYFREKEVPEV

SEQ ID NO: 120 - protein, 649 aa, Artificial Sequence
  Synthetic polypeptide
VPKKKLMRELAKKAVFEAIFNDPIPGSFGCKRCTLIDGARVTDAIEKKQGAKRCAGCEPCTFHTLYDSVKHALPAATGCDRTAIDTGLWEILTALRSYNWMSFRRNAVSDASQKQVWSIEELAIWADKERALRVILSALTHTIGKLKNGFSRDGVWKGGKQLYENLAQKDLAKGLFANGEIFGKELVEADHDMLAWTIVPNHQFHIGLIRGNWKPAAVEASTAFDARWLTNGAPLRDTRTHGHRGRRFNRTEKLTVLCIKRDGGVSEEFRQERDYELSVMLLQPKNKLKPEPKGELNSFEDLHDHWWFLKGDEATALVGLTSDPTVGDFIQLGLYIRNPIKAHGETKRRLLICFEPPIKLPLRRAFPSEAFKTWEPTINVFRNGRRDTEAYYDIDRARVFEFPETRVSLEHLSKQWEVLRLEPDRENTDPYEAQQNEGAELQVYSLLQEAAQKMAPKVVIDPFGQFPLELFSTFVAQLFNAPLSDTKAKIGKPLDSGFVVESHLHLLEEDFAYRDFVRVTFMGTEPTFRVIHYSNGEGYWKKTVLKGKNNIRTALIPEGAKAAVDAYKNKRCPLTLEAAILNEEKDRRLVLGNKALSLLAQTARGNLTILEALAAEVLRPLSGTEGVVHLHACVTRHSTLTESTETDNM

SEQ ID NO: 121 - protein, 414 aa, Artificial Sequence
  Synthetic polypeptide
VEKLFSERLKRAMWLKNEAGRAPPAETLTLKHKRVSGGHEKVKEELQRVLRSLSGTNQAAWNLGLSGGREPKSSDALKGEKSRVVLETVVFHSGHNRVLYDVIEREDQVHQRSSIMHMRRKGSNLLRLWGRSGKVRRKMREEVAEIKPVWHKDSRWLAIVEEGRQSVVGISSAGLAVFAVQESQCTTAEPKPLEYVVSIWFRGSKALNPQDRYLEFKKLKTTEALRGQQYDPIPFSLKRGAGCSLAIRGEGIKFGSRGPIKQFFGSDRSRPSHADYDGKRRLSLFSKYAGDLADLTEEQWNRTVSAFAEDEVRRATLANIQDFLSISHEKYAERLKKRIESIEEPVSASKLEAYLSAIFETFVQQREALASNFLMRLVESVALLISLEEKSPRVEFRVARYLAESKEGFNRKAM

SEQ ID NO: 122 - protein, 413 aa, Artificial Sequence
  Synthetic polypeptide
VVITQSELYKERLLRVMEIKNDRGRKEPRESQGLVLRFTQVTGGQEKVKQKLWLIFEGFSGTNQASWNFGQPAGGRKPNSGDALKGPKSRVTYETVVFHFGLRLLSAVIERHNLKQQRQTMAYMKRRAAARKKWARSGKKCSRMRNEVEKIKPKWHKDPRWFDIVKEGEPSIVGISSAGFAIYIVEEPNFPRQDPLEIEYAISIWFRRDRSQYLTFKKIQKAEKLKELQYNPIPFRLKQEKTSLVFESGDIKFGSRGSIEHFRDEARGKPPKADMDNNRRLTMFSVFSGNLTNLTEEQYARPVSGLLAPDEKRMPTLLKKLQDFFTPIHEKYGERIKQRLANSEASKRPFKKLEEYLPAIYLEFRARREGLASNWVLVLINSVRTLVRIKSEDPYIEFKVSQYLLEKEDNKAL

SEQ ID NO: 123 - protein, 449 aa, Artificial Sequence
  Synthetic polypeptide
KQDALFEERLKKAIFIKRQADPLQREELSLLPPNRKIVTGGHESAKDTLKQILRAINGTNQASWNPGTPSGKRDSKSADALAGPKSRVKLETVVFHVGHRLLKKVVEYQGHQKQQHGLKAFMRTCAAMRKKWKRSGKVVGELREQLANIQPKWHYDSRPLNLCFEGKPSVVGLRSAGIALYTIQKSVVPVKEPKPIEYAVSIWFRGPKAMDREDRCLEFKKLKIATELRKLQFEPIVSTLTQGIKGFSLYIQGNSVKFGSRGPIKYFSNESVRQRPPKADPDGNKRLALFSKFSGDLSDLTEEQWNRPILAFEGIIRRATLGNIQDYLTVGHEQFAISLEQLLSEKESVLQMSIEQQRLKKNLGKKAENEWVESFGAEQARKKAQGIREYISGFFQEYCSQREQWAENWVQQLNKSVRLFLTIQDSTPFIEFRVARYLPKGEKKKGKAM

SEQ ID NO: 124 - protein, 711 aa, Artificial Sequence
  Synthetic polypeptide
ANHAERHKRLRKEANRAANRNRPLVADCDTGDPLVGICRLLRRGDKMQPNKTGCRSCEQVEPELRDAILVSGPGRLDNYKYELFQRGRAMAVHRLLKRVPKLNRPKKAAGNDEKKAENKKSEIQKEKQKQRRMMPAVSMKQVSVADFKHVIENTVRHLFGDRRDREIAECAALRAASKYFLKSRRVRPRKLPKLANPDHGKELKGLRLREKRAKLKKEKEKQAELARSNQKGAVLHVATLKKDAPPMPYEKTQGRNDYTTFVISAAIKVGATRGTKPLLTPQPREWQCSLYWRDGQRWIRGGLLGLQAGIVLGPKLNRELLEAVLQRPIECRMSGCGNPLQVRGAAVDFFMTTNPFYVSGAAYAQKKFKPFGTKRASEDGAAAKAREKLMTQLAKVLDKVVTQAAHSPLDGIWETRPEAKLRAMIMALEHEWIFLRPGPCHNAAEEVIKCDCTGGHAILWALIDEARGALEHKEFYAVTRAHTHDCEKQKLGGRLAGFLDLLIAQDVPLDDAPAARKIKTLLEATPPAPCYKAATSIATCDCEGKFDKLWAIIDATRAGHGTEDLWARTLAYPQNVNCKCKAGKDLTHRLADFLGLLIKRDGPFRERPPHKVTGDRKLVFSGDKKCKGHQYVILAKAHNEEVVRAWISRWGLKSRTNKAGYAATELNLLLNWLSICRRRWMDMLTVQRDTPYIRMKTGRLVVDDKKERKAM

SEQ ID NO: 125 - protein, 574 aa, Artificial Sequence
  Synthetic polypeptide
AKQREALRVALERGIVRASNRTYTLVTNCTKGGPLPEQCRMIERGKARAMKWEPKLVGCGSCAAATVDLPAIEEYAQPGRLDVAKYKLTTQILAMATRRMMVRAAKLSRRKGQWPAKVQEEKEEPPEPKKMLKAVEMRPVAIVDFNRVIQTTIEHLWAERANADEAELKALKAAAAYFGPSLKIRARGPPKAAIGRELKKAHRKKAYAERKKARRKRAELARSQARGAAAHAAIRERDIPPMAYERTQGRNDVTTIPIAAAIKIAATRGARPLPAPKPMKWQCSLYWNEGQRWIRGGMLTAQAYAHAANIHRPMRCEMWGVGNPLKVRAFEGRVADPDGAKGRKAEFRLQTNAFYVSGAAYRNKKFKPFGTDRGGIGSARKKRERLMAQLAKILDKVVSQAAHSPLDDIWHTRPAQKLRAMIKQLEHEWMFLRPQAPTVEGTKPDVDVAGNMQRQIKALMAPDLPPIEKGSPAKRFTGDKRKKGERAVRVAEAHSDEVVTAWISRWGIQTRRNEGSYAAQELELLLNWLQICRRRWLDMTAAQRVSPYIRMKSGRMITDAADEGVAPIPLVENM

SEQ ID NO: 126 - protein, 743 aa, Artificial Sequence
  Synthetic polypeptide
KSISGRSIKHMACLKDMLKSEITEIEEKQKKESLRKWDYYSKFSDEILFRRNLNVSANHDANACYGCNPCAFLKEVYGFRIERRNNERIISYRRGLAGCKSCVQSTGYPPIEFVRRKFGADKAMEIVREVLHRRNWGALARNIGREKEADPILGELNELLLVDARPYFGNKSAANETNLAFNVITRAAKKFRDEGMYDIHKQLDIHSEEGKVPKGRKSRLIRIERKHKAIHGLDPGETWRYPHCGKGEKYGVWLNRSRLIHIKGNEYRCLTAFGTTGRRMSLDVACSVLGHPLVKKKRKKGKKTVDGTELWQIKKATETLPEDPIDCTFYLYAAKPTKDPFILKVGSLKAPRWKKLHKDFFEYSDTEKTQGQEKGKRVVRRGKVPRILSLRPDAKFKVSIWDDPYNGKNKEGTLLRMELSGLDGAKKPLILKRYGEPNTKPKNFVFWRPHITPHPLTFTPKHDFGDPNKKTKRRRVFNREYYGHLNDLAKMEPNAKFFEDREVSNKKNPKAKNIRIQAKESLPNIVAKNGRWAAFDPNDSLWKLYLHWRGRRKTIKGGISQEFQEFKERLDLYKKHEDESEWKEKEKLWENHEKEWKKTLEIHGSIAEVSQRCVMQSMMGPLDGLVQKKDYVHIGQSSLKAADDAWTFSANRYKKATGPKWGKISVSNLLYDANQANAELISQSISKYLSKQKDNQGCEGRKMKFLIKIIEPLRENFVKHTRWLHEMTQKDCEVRAQFSRVSM

SEQ ID NO: 127 - protein, 769 aa, Artificial Sequence
  Synthetic polypeptide
FPSDVGADALKHVRMLQPRLTDEVRKVALTRAPSDRPALARFAAVAQDGLAFVRHLNVSANHDSNCTFPRDPRDPRRGPCEPNPCAFLREVWGFRIVARGNERALSYRRGLAGCKSCVQSTGFPSVPFHRIGADDCMRKLHEILKARNWRLLARNIGREREADPLLTELSEYLLVDARTYPDGAAPNSGRLAENVIKRAAKKFRDEGMRDIHAQLRVHSREGKVPKGRLQRLRRIERKHRAIHALDPGPSWEAEGSARAEVQGVAVYRSQLLRVGHHTQQIEPVGIVARTLFGVGRTDLDVAVSVLGAPLTKRKKGSKTLESTEDFRIAKARETRAEDKIEVAFVLYPTASLLRDEIPKDAFPAMRIDRFLLKVGSVQADREILLQDDYYRFGDAEVKAGKNKGRTVTRPVKVPRLQALRPDAKFRVNVWADPFGAGDSPGTLLRLEVSGVTRRSQPLRLLRYGQPSTQPANFLCWRPHRVPDPMTFTPRQKFGERRKNRRTRRPRVFERLYQVHIKHLAHLEPNRKWFEEARVSAQKWAKARAIRRKGAEDIPVVAPPAKRRWAALQPNAELWDLYAHDREARKRFRGGRAAEGEEFKPRLNLYLAHEPEAEWESKRDRWERYEKKWTAVLEEHSRMCAVADRTLPQFLSDPLGARMDDKDYAFVGKSALAVAEAFVEEGTVERAQGNCSITAKKKFASNASRKRLSVANLLDVSDKADRALVFQAVRQYVQRQAENGGVEGRRMAFLRKLLAPLRQNFVCHTRWLHM

SEQ ID NO: 128 - protein, 564 aa, Artificial Sequence
  Synthetic polypeptide
AARKKKRGKIGITVKAKEKSPPAAGPFMARKLVNVAANVDGVEVHLCVECEADAHGSASARLLGGCRSCTGSIGAEGRLMGSVDVDRERVIAEPVHTETERLGPDVKAFEAGTAESKYAIQRGLEYWGVDLISRNRARTVRKMEEADRPESSTMEKTSWDEIAIKTYSQAYHASENHLFWERQRRVRQHALALFRRARERNRGESPLQSTQRPAPLVLAALHAEAAAISGRARAEYVLRGPSANVRAAAADIDAKPLGHYKTPSPKVARGFPVKRDLLRARHRIVGLSRAYFKPSDVVRGTSDAIAHVAGRNIGVAGGKPKEIEKTFTLPFVAYWEDVDRVVHCSSFKADGPWVRDQRIKIRGVSSAVGTFSLYGLDVAWSKPTSFYIRCSDIRKKFHPKGFGPMKHWRQWAKELDRLTEQRASCVVRALQDDEELLQTMERGQRYYDVFSCAATHATRGEADPSGGCSRCELVSCGVAHKVTKKAKGDTGIEAVAVAGCSLCESKLVGPSKPRVHRQMAALRQSHALNYLRRLQREWEALEAVQAPTPYLRFKYARHLEVRSM

SEQ ID NO: 129 - protein, 565 aa, Artificial Sequence
  Synthetic polypeptide
AAKKKKQRGKIGISVKPKEGSAPPADGPFMARKLVNVAANVDGVEVNLCIECEADAHGSAPARLLGGCKSCTGSIGAEGRLMGSVDVDRADAIAKPVNTETEKLGPDVQAFEAGTAETKYALQRGLEYWGVDLISRNRSRTVRRTEEGQPESATMEKTSWDEIAIKSYTRAYHASENHLFWERQRRVRQHALALFKRAKERNRGDSTLPREPGHGLVAIAALACEAYAVGGRNLAETVVRGPTFGTARAVRDVEIASLGRYKTPSPKVAHGSPVKRDFLRARHRIVGLARAYYRPSDVVRGTSDAIAHVAGRNIGVAGGKPRAVEAVFTLPFVAYWEDVDRVVHCSSFQVSAPWNRDQRMKIAGVTTAAGTFSLHGGELKWAKPTSFYIRCSDTRRKFRPKGFGPMKRWRQWAKDLDRLVEQRASCVVRALQDDAALLETMERGQRYYDVFACAVTHATRGEADRLAGCSRCALTPCQEAHRVTTKPRGDAGVEQVQTSDCSLCEGKLVGPSKPRLHRTLTLLRQEHGLNYLRRLQREWESLEAVQVPTPYLRFKYARHLEVRSM

SEQ ID NO: 130 - protein, 499 aa, Artificial Sequence
  Synthetic polypeptide
TDSQSESVPEVVYALTGGEVPGRVPPDGGSAEGARNAPTGLRKQRGKIKISAKPSKPGSPASSLARTLVNEAANVDGVQSSGCATCRMRANGSAPRALPIGCVACASSIGRAPQEETVCALPTTQGPDVRLLEGGHALRKYDIQRALEYWGVDLIGRNLDRQAGRGMEPAEGATATMKRVSMDELAVLDFGKSYYASEQHLFAARQRRVRQHAKALKIRAKHANRSGSVKRALDRSRKQVTALAREFFKPSDVVRGDSDALAHVVGRNLGVSRHPAREIPQTFTLPLCAYWEDVDRVISCSSLLAGEPFARDQEIRIEGVSSALGSLRLYRGAIEWHKPTSLYIRCSDTRRKFRPRGGLKKRWRQWAKDLDRLVEQRACCIVRSLQADVELLQTMERAQRFYDVHDCAATHVGPVAVRCSPCAGKQFDWDRYRLLAALRQEHALNYLRRLQREWESLEAQQVKMPYLRFKYARKLEVSGPLIGLEVRREPSMGTAIAEM

SEQ ID NO: 131 - protein, 358 aa, Artificial Sequence
  Synthetic polypeptide
AGTAGRRHGSLGARRSINIAGVTDRHGRWGCESCVYTRDQAGNRARCAPCDQSTYAPDVQEVTIGQRQAKYTIFLTLQSFSWTNTMRNNKRAAAGRSKRTTGKRIGQLAEIKITGVGLAHAHNVIQRSLQHNITKMWRAEKGKSKRVARLKKAKQLTKRRAYFRRRMSRQSRGNGFFRTGKGGIHAVAPVKIGLDVGMIASGSSEPADEQTVTLDAIWKGRKKKIRLIGAKGELAVAACRFREQQTKGDKCIPLILQDGEVRWNQNNWQCHPKKLVPLCGLEVSRKFVSQADRLAQNKVASPLAARFDKTSVKGTLVESDFAAVLVNVTSIYQQCHAMLLRSQEPTPSLRVQRTITSM

SEQ ID NO: 132 - protein, 369 aa, Artificial Sequence
  Synthetic polypeptide
GVRFSPAQSQVFFRTVIPQSVEARFAINMAAIHDAAGAFGCSVCRFEDRTPRNAKAVHGCSPCTRSTNRPDVFVLPVGAIKAKYDVFMRLLGFNWTHLNRRQAKRVTVRDRIGQLDELAISMLTGKAKAVLKKSICHNVDKSFKAMRGSLKKLHRKASKTGKSQLRAKLSDLRERTNTTQEGSHVEGDSDVALNKIGLDVGLVGKPDYPSEESVEVVVCLYFVGKVLILDAQGRIRDMRAKQYDGFKIPIIQRGQLTVLSVKDLGKWSLVRQDYVLAGDLRFEPKISKDRKYAECVKRIALITLQASLGFKERIPYYVTKQVEIKNASHIAFVTEAIQNCAENFREMTEYLMKYQEKSPDLKVLLTQLM

SEQ ID NO: 133 - protein, 486 aa, Artificial Sequence
  Synthetic polypeptide
RAVVGKVFLEQARRALNLATNFGTNHRTGCNGCYVTPGKLSIPQDGEKNAAGCTSCLMKATASYVSYPKPLGEKVAKYSTLDALKGFPWYSLRLNLRPNYRGKPINGVQEVAPVSKFRLAEEVIQAVQRYHFTELEQSFPGGRRRLRELRAFYTKEYRRAPEQRQHVVNGDRNIVVVTVLHELGFSVGMFNEVELLPKTPIECAVNVFIRGNRVLLEVRKPQFDKERLLVESLWKKDSRRHTAKWTPPNNEGRIFTAEGWKDFQLPLLLGSTSRSLRAIEKEGFVQLAPGRDPDYNNTIDEQHSGRPFLPLYLYLQGTISQEYCVFAGTWVIPFQDGISPYSTKDTFQPDLKRKAYSLLLDAVKHRLGNKVASGLQYGRFPAIEELKRLVRMHGATRKIPRGEKDLLKKGDPDTPEWWLLEQYPEFWRLCDAAAKRVSQNVGLLLSLKKQPLWQRRWLESRTRNEPLDNLPLSMALTLHLTNEEAL

SEQ ID NO: 134 - protein, 400 aa, Artificial Sequence
  Synthetic polypeptide
AAVYSKFYIENHFKMGIPETLSRIRGPSIIQGFSVNENYINIAGVGDRDFIFGCKKCKYTRGKPSSKKINKCHPCKRSTYPEPVIDVRGSISEFKYKIYNKLKQEPNQSIKQNTKGRMNPSDHTSSNDGIIINGIDNRIAYNVIFSSYKHLMEKQINLLRDTTKRKARQIKKYNNSGKKKHSLRSQTKGNLKNRYHMLGMFKKGSLTITNEGDFITAVRKVGLDISLYKNESLNKQEVETELCLNIKWGRTKSYTVSGYIPLPINIDWKLYLFEKETGLTLRLFGNKYKIQSKKFLIAQLFKPKRPPCADPVVKKAQKWSALNAHVQQMAGLFSDSHLLKRELKNRMHKQLDFKSLWVGTEDYIKWFEELSRSYVEGAEKSLEFFRQDYFCFNYTKQTTM

SEQ ID NO: 135 - protein, 666 aa, Artificial Sequence
  Synthetic polypeptide
PQQQRDLMLMAANYDQDYGNGCGPCTVVASAAYRPDPQAQHGCKRHLRTLGASAVTHVGLGDRTATITALHRLRGPAALAARARAAQAASAPMTPDTDAPDDRRRLEAIDADDVVLVGAHRALWSAVRRWADDRRAALRRRLHSEREWLLKDQIRWAELYTLIEASGTPPQGRWRNTLGALRGQSRWRRVLAPTMRATCAETHAELWDALAELVPEMAKDRRGLLRPPVEADALWRAPMIVEGWRGGHSVVVDAVAPPLDLPQPCAWTAVRLSGDPRQRWGLHLAVPPLGQVQPPDPLKATLAVSMRHRGGVRVRTLQAMAVDADAPMQRHLQVPLTLQRGGGLQWGIHSRGVRRREARSMASWEGPPIWTGLQLVNRWKGQGSALLAPDRPPDTPPYAPDAAVAPAQPDTKRARRTLKEACTVCRCAPGHMRQLQVTLTGDGTWRRFRLRAPQGAKRKAEVLKVATQHDERIANYTAWYLKRPEHAAGCDTCDGDSRLDGACRGCRPLLVGDQCFRRYLDKIEADRDDGLAQIKPKAQEAVAAMAAKRDARAQKVAARAAKLSEATGQRTAATRDASHEARAQKELEAVATEGTTVRHDAAAVSAFGSWVARKGDEYRHQVGVLANRLEHGLRLQELMAPDSVVADQQRASGHARVGYRYVLTAM

SEQ ID NO: 136 - protein, 560 aa, Artificial Sequence
  Synthetic polypeptide
AVAHPVGRGNAGSPGARGPEELPRQLVNRASNVTRPATYGCAPCRHVRLSIPKPVLTGCRACEQTTHPAPKRAVRGGADAAKYDLAAFFAGWAADLEGRNRRRQVHAPLDPQPDPNHEPAVTLQKIDLAEVSIEEFQRVLARSVKHRHDGRASREREKARAYAQVAKKRRNSHAHGARTRRAVRRQTRAVRRAHRMGANSGEILVASGAEDPVPEAIDHAAQLRRRIRACARDLEGLRHLSRRYLKTLEKPCRRPRAPDLGRARCHALVESLQAAERELEELRRCDSPDTAMRRLDAVLAAAASTDATFATGWTVVGMDLGVAPRGSAAPEVSPMEMAISVFWRKGSRRVIVSKPIAGMPIRRHELIRLEGLGTLRLDGNHYTGAGVTKGRGLSEGTEPDFREKSPSTLGFTLSDYRHESRWRPYGAKQGKTARQFFAAMSRELRALVEHQVLAPMGPPLLEAHERRFETLLKGQDNKSIHAGGGGRYVWRGPPDSKKRPAADGDWFRFGRGHADHRGWANKRHELAANYLQSAFRLWSTLAEAQEPTPYARYKYTRVTM

SEQ ID NO: 137 - protein, 404 aa, Artificial Sequence
  Synthetic polypeptide
WDFLTLQVYERHTSPEVCVAGNSTKCASGTRKSDHTHGVGVKLGAQEINVSANDDRDHEVGCNICVISRVSLDIKGWRYGCESCVQSTPEWRSIVRFDRNHKEAKGECLSRFEYWGAQSIARSLKRNKLMGGVNLDELAIVQNENVVKTSLKHLFDKRKDRIQANLKAVKVRMRERRKSGRQRKALRRQCRKLKRYLRSYDPSDIKEGNSCSAFTKLGLDIGISPNKPPKIEPKVEVVFSLFYQGACDKIVTVSSPESPLPRSWKIKIDGIRALYVKSTKVKFGGRTFRAGQRNNRRKVRPPNVKKGKRKGSRSQFFNKFAVGLDAVSQQLPIASVQGLWGRAETKKAQTICLKQLESNKPLKESQRCLFLADNWVVRVCGFLRALSQRQGPTPYIRYRYRCNM

SEQ ID NO: 138 - protein, 392 aa, Artificial Sequence
  Synthetic polypeptide
ARNVGQRNASRQSKRESAKARSRRVTGGHASVTQGVALINAAANADRDHTTGCEPCTWERVNLPLQEVIHGCDSCTKSSPFWRDIKVVNKGYREAKEEIMRIASGISADHLSRALSHNKVMGRLNLDEVCILDFRTVLDTSLKHLTDSRSNGIKEHIRAVHRKIRMRRKSGKTARALRKQYFALRRQWKAGHKPNSIREGNSLTALRAVGFDVGVSEGTEPMPAPQTEVVLSVFYKGSATRILRISSPHPIAKRSWKVKIAGIKALKLIRREHDFSFGRETYNASQRAEKRKFSPHAARKDFFNSFAVQLDRLAQQLCVSSVENLWVTEPQQKLLTLAKDTAPYGIREGARFADTRARLAWNWVFRVCGFTRALHQEQEPTPYCRFTWRSKM

SEQ ID NO: 139 - protein, 707 aa, Artificial Sequence
  Synthetic polypeptide
MADTPTLFTQFLRHHLPGQRFRKDILKQAGRILANKGEDATIAFLRGKSEESPPDFQPPVKCPIIACSRPLTEWPIYQASVAIQGYVYGQSLAEFEASDPGCSKDGLLGWFDKTGVCTDYFSVQGLNLIFQNARKRYIGVQTKVTNRNEKRHKKLKRINAKRIAEGLPELTSDEPESALDETGHLIDPPGLNTNIYCYQQVSPKPLALSEVNQLPTAYAGYSTSGDDPIQPMVTKDRLSISKGQPGYIPEHQRALLSQKKHRRMRGYGLKARALLVIVRIQDDWAVIDLRSLLRNAYWRRIVQTKEPSTITKLLKLVTGDPVLDATRMVATFTYKPGIVQVRSAKCLKNKQGSKLFSERYLNETVSVTSIDLGSNNLVAVATYRLVNGNTPELLQRFTLPSHLVKDFERYKQAHDTLEDSIQKTAVASLPQGQQTEIRMWSMYGFREAQERVCQELGLADGSIPWNVMTATSTILTDLFLARGGDPKKCMFTSEPKKKKNSKQVLYKIRDRAWAKMYRTLLSKETREAWNKALWGLKRGSPDYARLSKRKEELARRCVNYTISTAEKRAQCGRTIVALEDLNIGFFHGRGKQEPGWVGLFTRKKENRWLMQALHKAFLELAHHRGYHVIEVNPAYTSQTCPVCRHCDPDNRDQHNREAFHCIGCGFRGNADLDVATHNIAMVAITGESLKRARGSVASKTPQPLAAE

SEQ ID NO: 140 - protein, 757 aa, Artificial Sequence
  Synthetic polypeptide
MPKPAVESEFSKVLKKHFPGERFRSSYMKRGGKILAAQGEEAVVAYLQGKSEEEPPNFQPPAKCHVVTKSRDFAEWPIMKASEAIQRYIYALSTTERAACKPGKSSESHAAWFAATGVSNHGYSHVQGLNLIFDHTLGRYDGVLKKVQLRNEKARARLESINASRADEGLPEIKAEEEEVATNETGHLLQPPGINPSFYVYQTISPQAYRPRDEIVLPPEYAGYVRDPNAPIPLGVVRNRCDIQKGCPGYIPEWQREAGTAISPKTGKAVTVPGLSPKKNKRMRRYWRSEKEKAQDALLVTVRIGTDWVVIDVRGLLRNARWRTIAPKDISLNALLDLFTGDPVIDVRRNIVTFTYTLDACGTYARKWTLKGKQTKATLDKLTATQTVALVAIDLGQTNPISAGISRVTQENGALQCEPLDRFTLPDDLLKDISAYRIAWDRNEEELRARSVEALPEAQQAEVRALDGVSKETARTQLCADFGLDPKRLPWDKMSSNTTFISEALLSNSVSRDQVFFTPAPKKGAKKKAPVEVMRKDRTWARAYKPRLSVEAQKLKNEALWALKRTSPEYLKLSRRKEELCRRSINYVIEKTRRRTQCQIVIPVIEDLNVRFFHGSGKRLPGWDNFFTAKKENRWFIQGLHKAFSDLRTHRSFYVFEVRPERTSITCPKCGHCEVGNRDGEAFQCLSCGKTCNADLDVATHNLTQVALTGKTMPKREEPRDAQGTAPARKTKKASKSKAPPAEREDQTPAQEPSQTS

SEQ ID NO: 141 - protein, 765 aa, Artificial Sequence
  Synthetic polypeptide
MYILEMADLKSEPSLLAKLLRDRFPGKYWLPKYWKLAEKKRLTGGEEAACEYMADKQLDSPPPNFRPPARCVILAKSRPFEDWPVHRVASKAQSFVIGLSEQGFAALRAAPPSTADARRDWLRSHGASEDDLMALEAQLLETIMGNAISLHGGVLKKIDNANVKAAKRLSGRNEARLNKGLQELPPEQEGSAYGADGLLVNPPGLNLNIYCRKSCCPKPVKNTARFVGHYPGYLRDSDSILISGTMDRLTIIEGMPGHIPAWQREQGLVKPGGRRRRLSGSESNMRQKVDPSTGPRRSTRSGTVNRSNQRTGRNGDPLLVEIRMKEDWVLLDARGLLRNLRWRESKRGLSCDHEDLSLSGLLALFSGDPVIDPVRNEVVFLYGEGIIPVRSTKPVGTRQSKKLLERQASMGPLTLISCDLGQTNLIAGRASAISLTHGSLGVRSSVRIELDPEIIKSFERLRKDADRLETEILTAAKETLSDEQRGEVNSHEKDSPQTAKASLCRELGLHPPSLPWGQMGPSTTFIADMLISHGRDDDAFLSHGEFPTLEKRKKFDKRFCLESRPLLSSETRKALNESLWEVKRTSSEYARLSQRKKEMARRAVNFVVEISRRKTGLSNVIVNIEDLNVRIFHGGGKQAPGWDGFFRPKSENRWFIQAIHKAFSDLAAHHGIPVIESDPQRTSMTCPECGHCDSKNRNGVRFLCKGCGASMDADFDAACRNLERVALTGKPMPKPSTSCERLLSATTGKVCSDHSLSHDAIEKAS

SEQ ID NO: 142 - protein, 766 aa, Artificial Sequence
  Synthetic polypeptide
MEKEITELTKIRREFPNKKFSSTDMKKAGKLLKAEGPDAVRDFLNSCQEIIGDFKPPVKTNIVSISRPFEEWPVSMVGRAIQEYYFSLTKEELESVHPGTSSEDHKSFFNITGLSNYNYTSVQGLNLIFKNAKAIYDGTLVKANNKNKKLEKKFNEINHKRSLEGLPIITPDFEEPFDENGHLNNPPGINRNIYGYQGCAAKVFVPSKHKMVSLPKEYEGYNRDPNLSLAGFRNRLEIPEGEPGHVPWFQRMDIPEGQIGHVNKIQRFNFVHGKNSGKVKFSDKTGRVKRYHHSKYKDATKPYKFLEESKKVSALDSILAIITIGDDWVVFDIRGLYRNVFYRELAQKGLTAVQLLDLFTGDPVIDPKKGVVTFSYKEGVVPVFSQKIVPRFKSRDTLEKLTSQGPVALLSVDLGQNEPVAARVCSLKNINDKITLDNSCRISFLDDYKKQIKDYRDSLDELEIKIRLEAINSLETNQQVEIRDLDVFSADRAKANTVDMFDIDPNLISWDSMSDARVSTQISDLYLKNGGDESRVYFEINNKRIKRSDYNISQLVRPKLSDSTRKNLNDSIWKLKRTSEEYLKLSKRKLELSRAVVNYTIRQSKLLSGINDIVIILEDLDVKKKFNGRGIRDIGWDNFFSSRKENRWFIPAFHKAFSELSSNRGLCVIEVNPAWTSATCPDCGFCSKENRDGINFTCRKCGVSYHADIDVATLNIARVAVLGKPMSGPADRERLGDTKKPRVARSRKTMKRKDISNSTVEAMVTA

SEQ ID NO: 143 - protein, 812 aa, Artificial Sequence
  Synthetic polypeptide
MDMLDTETNYATETPAQQQDYSPKPPKKAQRAPKGFSKKARPEKKPPKPITLFTQKHFSGVRFLKRVIRDASKILKLSESRTITFLEQAIERDGSAPPDVTPPVHNTIMAVTRPFEEWPEVILSKALQKHCYALTKKIKIKTWPKKGPGKKCLAAWSARTKIPLIPGQVQATNGLFDRIGSIYDGVEKKVTNRNANKKLEYDEAIKEGRNPAVPEYETAYNIDGTLINKPGYNPNLYITQSRTPRLITEADRPLVEKILWQMVEKKTQSRNQARRARLEKAAHLQGLPVPKFVPEKVDRSQKIEIRIIDPLDKIEPYMPQDRMAIKASQDGHVPYWQRPFLSKRRNRRVRAGWGKQVSSIQAWLTGALLVIVRLGNEAFLADIRGALRNAQWRKLLKPDATYQSLFNLFTGDPVVNTRTNHLTMAYREGVVNIVKSRSFKGRQTREHLLTLLGQGKTVAGVSFDLGQKHAAGLLAAHFGLGEDGNPVFTPIQACFLPQRYLDSLTNYRNRYDALTLDMRRQSLLALTPAQQQEFADAQRDPGGQAKRACCLKLNLNPDEIRWDLVSGISTMISDLYIERGGDPRDVHQQVETKPKGKRKSEIRILKIRDGKWAYDFRPKIADETRKAQREQLWKLQKASSEFERLSRYKINIARAIANWALQWGRELSGCDIVIPVLEDLNVGSKFFDGKGKWLLGWDNRFTPKKENRWFIKVLHKAVAELAPHRGVPVYEVMPHRTSMTCPACHYCHPTNREGDRFECQSCHVVKNTDRDVAPYNILRVAVEGKTLDRWQAEKKPQAEPDRPMILIDNQES

SEQ ID NO: 144 - protein, 812 aa, Artificial Sequence
  Synthetic polypeptide
MDMLDTETNYATETPAQQQDYSPKPPKKAQRAPKGFSKKARPEKKPPKPITLFTQKHFSGVRFLKRVIRDASKILKLSESRTITFLEQAIERDGSAPPDVTPPVHNTIMAVTRPFEEWPEVILSKALQKHCYALTKKIKIKTWPKKGPGKKCLAAWSARTKIPLIPGQVQATNGLFDRIGSIYDGVEKKVTNRNANKKLEYDEAIKEGRNPAVPEYETAYNIDGTLINKPGYNPNLYITQSRTPRLITEADRPLVEKILWQMVEKKTQSRNQARRARLEKAAHLQGLPVPKFVPEKVDRSQKIEIRIIDPLDKIEPYMPQDRMAIKASQDGHVPYWQRPFLSKRRNRRVRAGWGKQVSSIQAWLTGALLVIVRLGNEAFLADIRGALRNAQWRKLLKPDATYQSLFNLFTGDPVVNTRTNHLTMAYREGVVDIVKSRSFKGRQTREHLLTLLGQGKTVAGVSFDLGQKHAAGLLAAHFGLGEDGNPVFTPIQACFLPQRYLDSLTNYRNRYDALTLDMRRQSLLALTPAQQQEFADAQRDPGGQAKRACCLKLNLNPDEIRWDLVSGISTMISDLYIERGGDPRDVHQQVETKPKGKRKSEIRILKIRDGKWAYDFRPKIADETRKAQREQLWKLQKASSEFERLSRYKINIARAIANWALQWGRELSGCDIVIPVLEDLNVGSKFFDGKGKWLLGWDNRFTPKKENRWFIKVLHKAVAELAPHKGVPVYEVMPHRTSMTCPACHYCHPTNREGDRFECQSCHVVKNTDRDVAPYNILRVAVEGKTLDRWQAEKKPQAEPDRPMILIDNQES

SEQ ID NO: 145 - protein, 793 aa, Artificial Sequence
  Synthetic polypeptide
MSSLPTPLELLKQKHADLFKGLQFSSKDNKMAGKVLKKDGEEAALAFLSERGVSRGELPNFRPPAKTLVVAQSRPFEEFPIYRVSEAIQLYVYSLSVKELETVPSGSSTKKEHQRFFQDSSVPDFGYTSVQGLNKIFGLARGIYLGVITRGENQLQKAKSKHEALNKKRRASGEAETEFDPTPYEYMTPERKLAKPPGVNHSIMCYVDISVDEFDFRNPDGIVLPSEYAGYCREINTAIEKGTVDRLGHLKGGPGYIPGHQRKESTTEGPKINFRKGRIRRSYTALYAKRDSRRVRQGKLALPSYRHHMMRLNSNAESAILAVIFFGKDWVVFDLRGLLRNVRWRNLFVDGSTPSTLLGMFGDPVIDPKRGVVAFCYKEQIVPVVSKSITKMVKAPELLNKLYLKSEDPLVLVAIDLGQTNPVGVGVYRVMNASLDYEVVTRFALESELLREIESYRQRTNAFEAQIRAETFDAMTSEEQEEITRVRAFSASKAKENVCHRFGMPVDAVDWATMGSNTIHIAKWVMRHGDPSLVEVLEYRKDNEIKLDKNGVPKKVKLTDKRIANLTSIRLRFSQETSKHYNDTMWELRRKHPVYQKLSKSKADFSRRVVNSIIRRVNHLVPRARIVFIIEDLKNLGKVFHGSGKRELGWDSYFEPKSENRWFIQVLHKAFSETGKHKGYYIIECWPNWTSCTCPKCSCCDSENRHGEVFRCLACGYTCNTDFGTAPDNLVKIATTGKGLPGPKKRCKGSSKGKNPKIARSSETGVSVTESGAPKVKKSSPTQTSQSSSQSAP

SEQ ID NO: 146 - protein, 441 aa, Artificial Sequence
  Synthetic polypeptide
MNKIEKEKTPLAKLMNENFAGLRFPFAIIKQAGKKLLKEGELKTIEYMTGKGSIEPLPNFKPPVKCLIVAKRRDLKYFPICKASCEIQSYVYSLNYKDFMDYFSTPMTSQKQHEEFFKKSGLNIEYQNVAGLNLIFNNVKNTYNGVILKVKNRNEKLKKKAIKNNYEFEEIKTFNDDGCLINKPGINNVIYCFQSISPKILKNITHLPKEYNDYDCSVDRNIIQKYVSRLDIPESQPGHVPEWQRKLPEFNNTNNPRRRRKWYSNGRNISKGYSVDQVNQAKIEDSLLAQIKIGEDWIILDIRGLLRDLNRRELISYKNKLTIKDVLGFFSDYPIIDIKKNLVTFCYKEGVIQVVSQKSIGNKKSKQLLEKLIENKPIALVSIDLGQTNPVSVKISKLNKINNKISIESFTYRFLNEEILKEIEKYRKDYDKLELKLINEA

SEQ ID NO: 147 - protein, 812 aa, Artificial Sequence
  Synthetic polypeptide
MDMLDTETNYATETPSQQQDYSPKPPKKDRRAPKGFSKKARPEKKPPKPITLFTQKHFSGVRFLKRVIRDASKILKLSESRTITFLEQAIERDGSAPPDVTPPVHNTIMAVTRPFEEWPEVILSKALQKHCYALTKKIKIKTWPKKGPGKKCLAAWSARTKIPLIPGQVQATNGLFDRIGSIYDGVEKKVTNRNANKKLEYDEAIKEGRNPAVPEYETAYNIDGTLINKPGYNPNLYITQSRTPRLITEADRPLVEKILWQMVEKKTQSRNQARRARLEKAAHLQGLPVPKFVPEKVDRSQKIEIRIIDPLDKIEPYMPQDRMAIKASQDGHVPYWQRPFLSKRRNRRVRAGWGKQVSSIQAWLTGALLVIVRLGNEAFLADIRGALRNAQWRKLLKPDATYQSLFNLFTGDPVVNTRTNHLTMAYREGVVDIVKSRSFKGRQTREHLLTLLGQGKTVAGVSFDLGQKHAAGLLAAHFGLGEDGNPVFTPIQACFLPQRYLDSLTNYRNRYDALTLDMRRQSLLALTPAQQQEFADAQRDPGGQAKRACCLKLNLNPDEIRWDLVSGISTMISDLYIERGGDPRDVHQQVETKPKGKRKSEIRILKIRDGKWAYDFRPKIADETRKAQREQLWKLQKASSEFERLSRYKINIARAIANWALQWGRELSGCDIVIPVLEDLNVGSKFFDGKGKWLLGWDNRFTPKKENRWFIKVLHKAVAELAPHRGVPVYEVMPHRTSMTCPACHYCHPTNREGDRFECQSCHVVKNTDRDVAPYNILRVAVEGKTLDRWQAEKKPQAEPDRPMILIDNQES

SEQ ID NO: 148 - protein, 812 aa, Artificial Sequence
  Synthetic polypeptide
MDMLDTETNYATETPSQQQDYSPKPPKKDRRAPKGFSKKARPEKKPPKPITLFTQKHFSGVRFLKRVIRDASKILKLSESRTITFLEQAIERDGSAPPDVTPPVHNTIMAVTRPFEEWPEVILSKALQKHCYALTKKIKIKTWPKKGPGKKCLAAWSARTKIPLIPGQVQATNGLFDRIGSIYDGVEKKVTNRNANKKLEYDEAIKEGRNPAVPEYETAYNIDGTLINKPGYNPNLYITQSRTPRLITEADRPLVEKILWQMVEKKTQSRNQARRARLEKAAHLQGLPVPKFVPEKVDRSQKIEIRIIDPLDKIEPYMPQDRMAIKASQDGHVPYWQRPFLSKRRNRRVRAGWGKQVSSIQAWLTGALLVIVRLGNEAFLADIRGALRNAQWRKLLKPDATYQSLFNLFTGDPVVNTRTNHLTMAYREGVVNIVKSRSFKGRQTREHLLTLLGQGKTVAGVSFDLGQKHAAGLLAAHFGLGEDGNPVFTPIQACFLPQRYLDSLTNYRNRYDALTLDMRRQSLLALTPAQQQEFADAQRDPGGQAKRACCLKLNLNPDEIRWDLVSGISTMISDLYIERGGDPRDVHQQVETKPKGKRKSEIRILKIRDGKWAYDFRPKIADETRKAQREQLWKLQKASSEFERLSRYKINIARAIANWALQWGRELSGCDIVIPVLEDLNVGSKFFDGKGKWLLGWDNRFTPKKENRWFIKVLHKAVAELAPHRGVPVYEVMPHRTSMTCPACHYCHPTNREGDRFECQSCHVVKNTDRDVAPYNILRVAVEGKTLDRWQAEKKPQAEPDRPMILIDNQES

SEQ ID NO: 149 - protein, 761 aa, Artificial Sequence
  Synthetic polypeptide
MSNKTTPPSPLSLLLRAHFPGLKFESQDYKIAGKKLRDGGPEAVISYLTGKGQAKLKDVKPPAKAFVIAQSRPFIEWDLVRVSRQIQEKIFGIPATKGRPKQDGLSETAFNEAVASLEVDGKSKLNEETRAAFYEVLGLDAPSLHAQAQNALIKSAISIREGVLKKVENRNEKNLSKTKRRKEAGEEATFVEEKAHDERGYLIHPPGVNQTIPGYQAVVIKSCPSDFIGLPSGCLAKESAEALTDYLPHDRMTIPKGQPGYVPEWQHPLLNRRKNRRRRDWYSASLNKPKATCSKRSGTPNRKNSRTDQIQSGRFKGAIPVLMRFQDEWVIIDIRGLLRNARYRKLLKEKSTIPDLLSLFTGDPSIDMRQGVCTFIYKAGQACSAKMVKTKNAPEILSELTKSGPVVLVSIDLGQTNPIAAKVSRVTQLSDGQLSHETLLRELLSNDSSDGKEIARYRVASDRLRDKLANLAVERLSPEHKSEILRAKNDTPALCKARVCAALGLNPEMIAWDKMTPYTEFLATAYLEKGGDRKVATLKPKNRPEMLRRDIKFKGTEGVRIEVSPEAAEAYREAQWDLQRTSPEYLRLSTWKQELTKRILNQLRHKAAKSSQCEVVVMAFEDLNIKMMHGNGKWADGGWDAFFIKKRENRWFMQAFHKSLTELGAHKGVPTIEVTPHRTSITCTKCGHCDKANRDGERFACQKCGFVAHADLEIATDNIERVALTGKPMPKPESERSGDAKKSVGARKAAFKPEEDAEAAE

SEQ ID NO: 150 - protein, 717 aa, Artificial Sequence
  Synthetic polypeptide
MIKPTVSQFLTPGFKLIRNHSRTAGLKLKNEGEEACKKFVRENEIPKDECPNFQGGPAIANIIAKSREFTEWEIYQSSLAIQEVIFTLPKDKLPEPILKEEWRAQWLSEHGLDTVPYKEAAGLNLIIKNAVNTYKGVQVKVDNKNKNNLAKINRKNEIAKLNGEQEISFEEIKAFDDKGYLLQKPSPNKSIYCYQSVSPKPFITSKYHNVNLPEEYIGYYRKSNEPIVSPYQFDRLRIPIGEPGYVPKWQYTFLSKKENKRRKLSKRIKNVSPILGIICIKKDWCVFDMRGLLRTNHWKKYHKPTDSINDLFDYFTGDPVIDTKANVVRFRYKMENGIVNYKPVREKKGKELLENICDQNGSCKLATVDVGQNNPVAIGLFELKKVNGELTKTLISRHPTPIDFCNKITAYRERYDKLESSIKLDAIKQLTSEQKIEVDNYNNNFTPQNTKQIVCSKLNINPNDLPWDKMISGTHFISEKAQVSNKSEIYFTSTDKGKTKDVMKSDYKWFQDYKPKLSKEVRDALSDIEWRLRRESLEFNKLSKSREQDARQLANWISSMCDVIGIENLVKKNNFFGGSGKREPGWDNFYKPKKENRWWINAIHKALTELSQNKGKRVILLPAMRTSITCPKCKYCDSKNRNGEKFNCLKCGIELNADIDVATENLATVAITAQSMPKPTCERSGDAKKPVRARKAKAPEFHDKLAPSYTVVLREAV

SEQ ID NO: 151 - protein, 781 aa, Artificial Sequence
  Synthetic polypeptide
MRQPAEKTAFQVFRQEVIGTQKLSGGDAKTAGRLYKQGKMEAAREWLLKGARDDVPPNFQPPAKCLVVAVSHPFEEWDISKTNHDVQAYIYAQPLQAEGHLNGLSEKWEDTSADQHKLWFEKTGVPDRGLPVQAINKIAKAAVNRAFGVVRKVENRNEKRRSRDNRIAEHNRENGLTEVVREAPEVATNADGFLLHPPGIDPSILSYASVSPVPYNSSKHSFVRLPEEYQAYNVEPDAPIPQFVVEDRFAIPPGQPGYVPEWQRLKCSTNKHRRMRQWSNQDYKPKAGRRAKPLEFQAHLTRERAKGALLVVMRIKEDWVVFDVRGLLRNVEWRKVLSEEAREKLTLKGLLDLFTGDPVIDTKRGIVTFLYKAEITKILSKRTVKTKNARDLLLRLTEPGEDGLRREVGLVAVDLGQTHPIAAAIYRIGRTSAGALESTVLHRQGLREDQKEKLKEYRKRHTALDSRLRKEAFETLSVEQQKEIVTVSGSGAQITKDKVCNYLGVDPSTLPWEKMGSYTHFISDDFLRRGGDPNIVHFDRQPKKGKVSKKSQRIKRSDSQWVGRMRPRLSQETAKARMEADWAAQNENEEYKRLARSKQELARWCVNTLLQNTRCITQCDEIVVVIEDLNVKSLHGKGAREPGWDNFFTPKTENRWFIQILHKTFSELPKHRGEHVIEGCPLRTSITCPACSYCDKNSRNGEKFVCVACGATFHADFEVATYNLVRLATTGMPMPKSLERQGGGEKAGGARKARKKAKQVEKIVVQANANVTMNGASLHSP

SEQ ID NO: 152 - protein, 793 aa, Artificial Sequence; identical to SEQ ID NO: 145
  Synthetic polypeptide

SEQ ID NO: 153 - protein, 717 aa, Artificial Sequence; identical to SEQ ID NO: 150
  Synthetic polypeptide

SEQ ID NO: 154 - protein, 761 aa, Artificial Sequence; identical to SEQ ID NO: 149
  Synthetic polypeptide

SEQ ID NO: 155 - protein, 765 aa, Artificial Sequence
  Synthetic polypeptide
MYSLEMADLKSEPSLLAKLLRDRFPGKYWLPKYWKLAEKKRLTGGEEAACEYMADKQLDSPPPNFRPPARCVILAKSRPFEDWPVHRVASKAQSFVIGLSEQGFAALRAAPPSTADARRDWLRSHGASEDDLMALEAQLLETIMGNAISLHGGVLKKIDNANVKAAKRLSGRNEARLNKGLQELPPEQEGSAYGADGLLVNPPGLNLNIYCRKSCCPKPVKNTARFVGHYPGYLRDSDSILISGTMDRLTIIEGMPGHIPAWQREQGLVKPGGRRRRLSGSESNMRQKVDPSTGPRRSTRSGTVNRSNQRTGRNGDPLLVEIRMKEDWVLLDARGLLRNLRWRESKRGLSCDHEDLSLSGLLALFSGDPVIDPVRNEVVFLYGEGIIPVRSTKPVGTRQSKKLLERQASMGPLTLISCDLGQTNLIAGRASAISLTHGSLGVRSSVRIELDPEIIKSFERLRKDADRLETEILTAAKETLSDEQRGEVNSHEKDSPQTAKASLCRELGLHPPSLPWGQMGPSTTFIADMLISHGRDDDAFLSHGEFPTLEKRKKFDKRFCLESRPLLSSETRKALNESLWEVKRTSSEYARLSQRKKEMARRAVNFVVEISRRKTGLSNVIVNIEDLNVRIFHGGGKQAPGWDGFFRPKSENRWFIQAIHKAFSDLAAHHGIPVIESDPQRTSMTCPECGHCDSKNRNGVRFLCKGCGASMDADFDAACRNLERVALTGKPMPKPSTSCERLLSATTGKVCSDHSLSHDAIEKAS

SEQ ID NO: 156 - protein, 766 aa, Artificial Sequence
  Synthetic polypeptide
MEKEITELTKIRREFPNKKFSSTDMKKAGKLLKAEGPDAVRDFLNSCQEIIGDFKPPVKTNIVSISRPFEEWPVSMVGRAIQEYYFSLTKEELESVHPGTSSEDHKSFFNITGLSNYNYTSVQGLNLIFKNAKAIYDGTLVKANNKNKKLEKKFNEINHKRSLEGLPIITPDFEEPFDENGHLNNPPGINRNIYGYQGCAAKVFVPSKHKMVSLPKEYEGYNRDPNLSLAGFRNRLEIPEGEPGHVPWFQRMDIPEGQIGHVNKIQRFNFVHGKNSGKVKFSDKTGRVKRYHHSKYKDATKPYKFLEESKKVSALDSILAIITIGDDWVVFDIRGLYRNVFYRELAQKGLTAVQLLDLFTGDPVIDPKKGVVTFSYKEGVVPVFSQKIVPRFKSRDTLEKLTSQGPVALLSVDLGQNEPVAARVCSLKNINDKITLDNSCRISFLDDYKKQIKDYRDSLDELEIKIRLEAINSLETNQQVEIRDLDVFSADRAKANTVDMFDIDPNLISWDSMSDARVSTQISDLYLKNGGDESRVYFEINNKRIKRSDYNISQLVRPKLSDSTRKNLNDSIWKLKRTSEEYLKLSKRKLELSRAVVNYTIRQSKLLSGINDIVIILEDLDVKKKFNGRGIRDIGWDNFFSSRKENRWFIPAFHKTFSELSSNRGLCVIEVNPAWTSATCPDCGFCSKENRDGINFTCRKCGVSYHADIDVATLNIARVAVLGKPMSGPADRERLGDTKKPRVARSRKTMKRKDISNSTVEAMVTA

SEQ ID NO: 157 - protein, 870 aa, Artificial Sequence
  Synthetic polypeptide
MLVRTSTLVQDNKNSRSASRAFLKKPKMPKNKHIKEPTELAKLIRELFPGQRFTRAINTQAGKILKHKGRDEVVEFLKNKGIDKEQFMDFRPPTKARIVATSGAIEEFSYLRVSMAIQECCFGKYKFPKEKVNGKLVLETVGLTKEELDDFLPKKYYENKKSRDRFFLKTGICDYGYTYAQGLNEIFRNTRAIYEGVFTKVNNRNEKRREKKDKYNEERRSKGLSEEPYDEDESATDESGHLINPPGVNLNIWTCEGFCKGPYVTKLSGTPGYEVILPKVFDGYNRDPNEIISCGITDRFAIPEGEPGHIPWHQRLEIPEGQPGYVPGHQRFADTGQNNSGKANPNKKGRMRKYYGHGTKYTQPGEYQEVFRKGHREGNKRRYWEEDFRSEAHDCILYVIHIGDDWVVCDLRGPLRDAYRRGLVPKEGITTQELCNLFSGDPVIDPKHGVVTFCYKNGLVRAQKTISAGKKSRELLGALTSQGPIALIGVDLGQTEPVGARAFIVNQARGSLSLPTLKGSFLLTAENSSSWNVFKGEIKAYREAIDDLAIRLKKEAVATLSVEQQTEIESYEAFSAEDAKQLACEKFGVDSSFILWEDMTPYHTGPATYYFAKQFLKKNGGNKSLIEYIPYQKKKSKKTPKAVLRSDYNIACCVRPKLLPETRKALNEAIRIVQKNSDEYQRLSKRKLEFCRRVVNYLVRKAKKLTGLERVIIAIEDLKSLEKFFTGSGKRDNGWSNFFRPKKENRWFIPAFHKAFSELAPNRGFYVIECNPARTSITDPDCGYCDGDNRDGIKFECKKCGAKHHTDLDVAPLNIAIVAVTGRPMPKTVSNKSKRERSGGEKSVGASRKRNHRKSKANQEMLDATSSAAE

SEQ ID NO: 158 - protein, 830 aa, Artificial Sequence
  Synthetic polypeptide
MPKIKKPTEISLLRKEVFPDLHFAKDRMRAASLVLKNEGREAAIEYLRVNHEDKPPNFMPPAKTPYVALSRPLEQWPIAQASIAIQKYIFGLTKDEFSATKKLLYGDKSTPNTESRKRWFEVTGVPNFGYMSAQGLNAIFSGALARYEGVVQKVENRNKKRFEKLSEKNQLLIEEGQPVKDYVPDTAYHTPETLQKLAENNHVRVEDLGDMIDRLVHPPGIHRSIYGYQQVPPFAYDPDNPKGIILPKAYAGYTRKPHDIIEAMPNRLNIPEGQAGYIPEHQRDKLKKGGRVKRLRTTRVRVDATETVRAKAEALNAEKARLRGKEAILAVFQIEEDWALIDMRGLLRNVYMRKLIAAGELTPTTLLGYFTETLTLDPRRTEATFCYHLRSEGALHAEYVRHGKNTRELLLDLTKDNEKIALVTIDLGQRNPLAAAIFRVGRDASGDLTENSLEPVSRMLLPQAYLDQIKAYRDAYDSFRQNIWDTALASLTPEQQRQILAYEAYTPDDSKENVLRLLLGGNVMPDDLPWEDMTKNTHYISDRYLADGGDPSKVWFVPGPRKRKKNAPPLKKPPKPRELVKRSDHNISHLSEFRPQLLKETRDAFEKAKIDTERGHVGYQKLSTRKDQLCKEILNWLEAEAVRLTRCKTMVLGLEDLNGPFFNQGKGKVRGWVSFFRQKQENRWIVNGFRKNALARAHDKGKYILELWPSWTSQTCPKCKHVHADNRHGDDFVCLQCGARLHADAEVATWNLAVVAIQGHSLPGPVREKSNDRKKSGSARKSKKANESGKVVGAWAAQATPKRATSKKETGTARNPVYNPLETQASCPAP

SEQ ID NO: 159 - protein, 790 aa, Artificial Sequence
  Synthetic polypeptide
MTPSPQIARLVETPLAAALKAHHPGKKFRSDYLKKAGKILKDQGVEAAMAHLDGKDQAEPPNFKPPAKCRIVARSREFSEWPIVKASVEIQKYIYGLTLEERKACDPGKSSASHKAWFAKTGVNTFGYSSVQGFNLIFGHTLGRYDGVLVKTENLNKKRAEKNERFRAKALAEGRAEPVCPPLVTATNDTGQDVTLEDGRVVRPGQLLQPPGINPNIYAYQQVSPKAYVPGIIELPEEFQGYSRDPNAVILPLVPRDRLSIPKGQPGYVPEPHREGLTGRKDRRMRRYYETERGTKLKRPPLTAKGRADKANEALLVVVRIDSDWVVMDVRGLLRNARWRRLVSKEGITLNGLLDLFTGDPVLNPKDCSVSRDTGDPVNDPRHGVVTFCYKLGVVDVCSKDRPIKGFRTKEVLERLTSSGTVGMVSIDLGQTNPVAAAVSRVTKGLQAETLETFTLPDDLLGKVRAYRAKTDRMEEGFRRNALRKLTAEQQAEITRYNDATEQQAKALVCSTYGIGPEEVPWERMTSNTTYISDHILDHGGDPDTVFFMATKRGQNKPTLHKRKDKAWGQKFRPAISVETRLARQAAEWELRRASLEFQKLSVWKTELCRQAVNYVMERTKKRTQCDVIIPVIEDLPVPLFHGSGKRDPGWANFFVHKRENRWFIDGLHKAFSELGKHRGIYVFEVCPQRTSITCPKCGHCDPDNRDGEKFVCLSCQATLNADLDVATTNLVRVALTGKVMPRSERSGDAQTPGPARKARTGKIKGSKPTSAPQGATQTDAKAHLSQTGV

SEQ ID NO: 160 - protein, 790 aa, Artificial Sequence
  Synthetic polypeptide
MTPSPQIARLVETPLAAALKAHHPGKKFRSDYLKKAGKILKDQGVEAAMAHLDGKDQAEPPNFKPPAKCRIVARSREFSEWPIVKASVEIQKYIYGLTLEERKACDPGKSSASHKAWFAKTGVNTFGYSSVQGFNLIFGHTLGRYDGVLVKTENLNKKRAEKNERFRAKALAEGRAEPVCPPLVTATNDTGQDVTLEDGRVVRPGQLLQPPGINPNIYAYQQVSPKAYVPGIIELPEEFQGYSRDPNAVILPLVPRDRLSIPKGQPGYVPEPHREGLTGRKDRRMRRYYETERGTKLKRPPLTAKGRADKANEALLVVVRIDSDWVVMDVRGLLRNARWRRLVSKEGITLNGLLDLFTGDPVLNPKDCSVSRDTGDPVNDPRHGVVTFCYKLGVVDVCSKDRPIKGFRTKEVLERLTSSGTVGMVSIDLGQTNPVAAAVSRVTKGLQAETLETFTLPDDLLGKVRAYRAKTDRMEEGFRRNALRKLTAEQQAEITRYNDATEQQAKALVCSTYGIGPEEVPWERMTSNTTYISDHILDHGGDPDTVFFMATKRGQNKPTLHKRKDKAWGQKFRPAISVETRLARQAAEWELRRASLEFQKLSVWKTELCRQAVNYVMERTKKRTQCDVIIPVIEDLPVPLFHGSGKRDPGWANFFVHKRENRWFIDGLHKAFSELGKHRGIYVFEVCPQRTSITCPKCGHCDPDNRDGEKFVCLSCQATLHADLDVATTNLVRVALTGKVMPRSERSGDAQTPGPARKARTGKIKGSKPTSAPQGATQTDAKAHLSQTGV

SEQ ID NO: 161 - protein, 782 aa, Artificial Sequence
  Synthetic polypeptide
MKTEKPKTALTLLREEVFPGKKYRLDVLKEAGKKLSTKGREATIEFLTGKDEERPQNFQPPAKTSIVAQSRPFDQWPIVQVSLAVQKYIYGLTQSEFEANKKALYGETGKAISTESRRAWFEATGVDNFGFTAAQGINPIFSQAVARYEGVIKKVENRNEKKLKKLTKKNLLRLESGEEIEDFEPEATFNEEGRLLQPPGANPNIYCYQQISPRIYDPSDPKGVILPQIYAGYDRKPEDIISAGVPNRLAIPEGQPGYIPEHQRAGLKTQGRIRCRASVEAKARAAILAVVHLGEDWVVLDLRGLLRNVYWRKLASPGTLTLKGLLDFFTGGPVLDARRGIATFSYTLKSAAAVHAENTYKGKGTREVLLKLTENNSVALVTVDLGQRNPLAAMIARVSRTSQGDLTYPESVEPLTRLFLPDPFLEEVRKYRSSYDALRLSIREAAIASLTPEQQAEIRYIEKFSAGDAKKNVAEVFGIDPTQLPWDAMTPRTTYISDLFLRMGGDRSRVFFEVPPKKAKKAPKKPPKKPAGPRIVKRTDGMIARLREIRPRLSAETNKAFQEARWEGERSNVAFQKLSVRRKQFARTVVNHLVQTAQKMSRCDTVVLGIEDLNVPFFHGRGKYQPGWEGFFRQKKENRWLINDMHKALSERGPHRGGYVLELTPFWTSLRCPKCGHTDSANRDGDDFVCVKCGAKLHSDLEVATANLALVAITGQSIPRPPREQSSGKKSTGTARMKKTSGETQGKGSKACVSEALNKIEQGTARDPVYNPLNSQVSCPAP

SEQ ID NO: 162 - protein, 774 aa, Artificial Sequence
  Synthetic polypeptide
VYNPDMKKPNNIRRIREEHFEGLCFGKDVLTKAGKIYEKDGEEAAIDFLMGKDEEDPPNFKPPAKTTIVAQSRPFDQWPIYQVSQAVQERVFAYTEEEFNASKEALFSGDISSKSRDFWFKTNNISDQGIGAQGLNTILSHAFSRYSGVIKKVENRNKKRLKKLSKKNQLKIEEGLEILEFKPDSAFNENGLLAQPPGINPNIYGYQAVTPFVFDPDNPGDVILPKQYEGYSRKPDDIIEKGPSRLDIPKGQPGYVPEHQRKNLKKKGRVRLYRRTPPKTKALASILAVLQIGKDWVLFDMRGLLRSVYMREAATPGQISAKDLLDTFTGCPVLNTRTGEFTFCYKLRSEGALHARKIYTKGETRTLLTSLTSENNTIALVTVDLGQRNPAAIMISRLSRKEELSEKDIQPVSRRLLPDRYLNELKRYRDAYDAFRQEVRDEAFTSLCPEHQEQVQQYEALTPEKAKNLVLKHFFGTHDPDLPWDDMTSNTHYIANLYLERGGDPSKVFFTRPLKKDSKSKKPRKPTKRTDASISRLPEIRPKMPEDARKAFEKAKWEIYTGHEKFPKLAKRVNQLCREIANWIEKEAKRLTLCDTVVVGIEDLSLPPKRGKGKFQETWQGFFRQKFENRWVIDTLKKAIQNRAHDKGKYVLGLAPYWTSQRCPACGFIHKSNRNGDHFKCLKCEALFHADSEVATWNLALVAVLGKGITNPDSKKPSGQKKTGTTRKKQIKGKNKGKETVNVPPTTQEVEDIIAFFEKDDETVRNPVYKPTGT

SEQ ID NO: 163 - protein, 769 aa, Artificial Sequence
  Synthetic polypeptide
MKKPNNIRRIREEHFEGLCFGKDVLTKAGKIYEKDGEEAAIDFLMGKDEEDPPNFKPPAKTTIVAQSRPFDQWPIYQVSQAVQERVFAYTEEEFNASKEALFSGDISSKSRDFWFKTNNISDQGIGAQGLNTILSHAFSRYSGVIKKVENRNKKRLKKLSKKNQLKIEEGLEILEFKPDSAFNENGLLAQPPGINPNIYGYQAVTPFVFDPDNPGDVILPKQYEGYSRKPDDIIEKGPSRLDIPKGQPGYVPEHQRKNLKKKGRVRLYRRTPPKTKALASILAVLQIGKDWVLFDMRGLLRSVYMREAATPGQISAKDLLDTFTGCPVLNTRTGEFTFCYKLRSEGALHARKIYTKGETRTLLTSLTSENNTIALVTVDLGQRNPAAIMISRLSRKEELSEKDIQPVSRRLLPDRYLNELKRYRDAYDAFRQEVRDEAFTSLCPEHQEQVQQYEALTPEKAKNLVLKHFFGTHDPDLPWDDMTSNTHYIANLYLERGGDPSKVFFTRPLKKDSKSKKPRKPTKRTDASISRLPEIRPKMPEDARKAFEKAKWEIYTGHEKFPKLAKRVNQLCREIANWIEKEAKRLTLCDTVVVGIEDLSLPPKRGKGKFQETWQGFFRQKFENRWVIDTLKKAIQNRAHDKGKYVLGLAPYWTSQRCPACGFIHKSNRNGDHFKCLKCEALFHADSEVATWNLALVAVLGKGITNPDSKKPSGQKKTGTTRKKQIKGKNKGKETVNVPPTTQEVEDIIAFFEKDDETVRNPVYKPTGT

SEQ ID NO: 164 - protein, 767 aa, Artificial Sequence
  Synthetic polypeptide
VIKTHFPAGRFRKDHQKTAGKKLKHEGEEACVEYLRNKVSDYPPNFKPPAKGTIVAQSRPFSEWPIVRASEAIQKYVYGLTVAELDVFSPGTSKPSHAEWFAKTGVENYGYRQVQGLNTIFQNTVNRFKGVLKKVENRNKKSLKRQEGANRRRVEEGLPEVPVTVESATDDEGRLLQPPGVNPSIYGYQGVAPRVCTDLQGFSGMSVDFAGYRRDPDAVLVESLPEGRLSIPKGERGYVPEWQRDPERNKFPLREGSRRQRKWYSNACHKPKPGRTSKYDPEALKKASAKDALLVSISIGEDWAIIDVRGLLRDARRRGFTPEEGLSLNSLLGLFTEYPVFDVQRGLITFTYKLGQVDVHSRKTVPTFRSRALLESLVAKEEIALVSVDLGQTNPASMKVSRVRAQEGALVAEPVHRMFLSDVLLGELSSYRKRMDAFEDAIRAQAFETMTPEQQAEITRVCDVSVEVARRRVCEKYSISPQDVPWGEMTGHSTFIVDAVLRKGGDESLVYFKNKEGETLKFRDLRISRMEGVRPRLTKDTRDALNKAVLDLKRAHPTFAKLAKQKLELARRCVNFIEREAKRYTQCERVVFVIEDLNVGFFHGKGKRDRGWDAFFTAKKENRWVIQALHKAFSDLGLHRGSYVIEVTPQRTSMTCPRCGHCDKGNRNGEKFVCLQCGATLHADLEVATDNIERVALTGKAMPKPPVRERSGDVQKAGTARKARKPLKPKQKTEPSVQEGSSDDGVDKSPGDASRNPVYNPSDTLSI

SEQ ID NO: 165 - protein, 763 aa, Artificial Sequence
  Synthetic polypeptide
MAKAKTLAALLRELLPGQHLAPHHRWVANKLLMTSGDAAAFVIGKSVSDPVRGSFRKDVITKAGRIFKKDGPDAAAAFLDGKWEDRPPNFQPPAKAAIVAISRSFDEWPIVKVSCAIQQYLYALPVQEFESSVPEARAQAHAAWFQDTGVDDCNFKSTQGLNAIFNHGKRTYEGVLKKAQNRNDKKNLRLERINAKRAEAGQAPLVAGPDESPTDDAGCLLHPPGINANIYCYQQVSPRPYEQSCGIQLPPEYAGYNRLSNVAIPPMPNRLDIPQGQPGYVPEHHRHGIKKFGRVRKRYGVVPGRNRDADGKRTRQVLTEAGAAAKARDSVLAVIRIGDDWTVVDLRGLLRNAQWRKLVPDGGITVQGLLDLFTGDPVIDPRRGVVTFIYKADSVGIHSEKVCRGKQSKNLLERLCAMPEKSSTRLDCARQAVALVSVDLGQRNPVAARFSRVSLAEGQLQAQLVSAQFLDDAMVAMIRSYREEYDRFESLVREQAKAALSPEQLSEIVRHEADSAESVKSCVCAKFGIDPAGLSWDKMTSGTWRIADHVQAAGGDVEWFFFKTCGKGKEIKTVRRSDFNVAKQFRLRLSPETRKDWNDAIWELKRGNPAYVSFSKRKSEFARRVVNDLVHRARRAVRCDEVVFAIEDLNISFFHGKGQRQMGWDAFFEVKQENRWFIQALHKAFVERATHKGGYVLEVAPARTSTTCPECRHCDPESRRGEQFCCIKCRHTCHADLEVATFNIEQVALTGVSLPKRLSSTLL

SEQ ID NO: 166 - protein, 761 aa, Artificial Sequence
  Synthetic polypeptide
MSKEKTPPSAYAILKAKHFPDLDFEKKHKMMAGRMFKNGASEQEVVQYLQGKGSESLMDVKPPAKSPILAQSRPFDEWEMVRTSRLIQETIFGIPKRGSIPKRDGLSETQFNELVASLEVGGKPMLNKQTRAIFYGLLGIKPPTFHAMAQNILIDLAINIRKGVLKKVDNLNEKNRKKVKRIRDAGEQDVMVPAEVTAHDDRGYLNHPPGVNPTIPGYQGVVIPFPEGFEGLPSGMTPVDWSHVLVDYLPHDRLSIPKGSPGYIPEWQRPLLNRHKGRRHRSWYANSLNKPRKSRTEEAKDRQNAGKRTALIEAERLKGVLPVLMRFKEDWLIIDARGLLRNARYRGVLPEGSTLGNLIDLFSDSPRVDTRRGICTFLYRKGRAYSTKPVKRKESKETLLKLTEKSTIALVSIDLGQTNPLTAKLSKVRQVDGCLVAEPVLRKLIDNASEDGKEIARYRVAHDLLRARILEDAIDLLGIYKDEVVRARSDTPDLCKERVCRFLGLDSQAIDWDRMTPYTDFIAQAFVAKGGDPKVVTIKPNGKPKMFRKDRSIKNMKGIRLDISKEASSAYREAQWAIQRESPDFQRLAVWQSQLTKRIVNQLVAWAKKCTQCDTVVLAFEDLNIGMMHGSGKWANGGWNALFLHKQENRWFMQAFHKALTELSAHKGIPTIEVLPHRTSITCTQCGHCHPGNRDGERFKCLKCEFLANTDLEIATDNIERVALTGLPMPKGERSSAKRKPGGTRKTKKSKHSGNSPLAAE

SEQ ID NO: 167 - protein, 746 aa, Artificial Sequence
  Synthetic polypeptide
MEKAGPTSPLSVLIHKNFEGCRFQIDHLKIAGRKLAREGEAAAIEYLLDKKCEGLPPNFQPPAKGNVIAQSRPFTEWAPYRASVAIQKYIYSLSVDERKVCDPGSSSDSHEKWFKQTGVQNYGYTHVQGLNLIFKHALARYDGVLKKVDNRNEKNRKKAERVNSFRREEGLPEEVFEEEKATDETGHLLQPPGVNHSIYCYQSVRPKPFNPRKPGGISLPEAYSGYSLKPQDELPIGSLDRLSIPPGQPGYVPEWQRSQLTTQKHRRKRSWYSAQKWKPRTGRTSTFDPDRLNCARAQGAILAVVRIHEDWVVFDVRGLLRNALWRELAGKGLTVRDLLDFFTGDPVVDTKRGVVTFTYKLGKVDVHSLRTVRGKRSKKVLEDLTLSSDVGLVTIDLGQTNVLAADYSKVTRSENGELLAVPLSKSFLPKHLLHEVTAYRTSYDQMEEGFRRKALLTLTEDQQVEVTLVRDFSVESSKTKLLQLGVDVTSLPWEKMSSNTTYISDQLLQQGADPASLFFDGERDGKPCRHKKKDRTWAYLVRPKVSPETRKALNEALWALKNTSPEFESLSKRKIQFSRRCMNYLLNEAKRISGCGQVVFVIEDLNVRVHHGRGKRAIGWDNFFKPKRENRWFMQALHKAASELAIHRGMHIIEACPARSSITCPKCGHCDPENRCSSDREKFLCVKCGAAFHADLEVATFNLRKVALTGTALPKSIDHSRDGLIPKGARNRKLKEPQANDEKACA

SEQ ID NO: 168 - protein, 735 aa, Artificial Sequence
  Synthetic polypeptide
MKEQSPLSSVLKSNFPGKKFLSADIRVAGRKLAQLGEAAAVEYLSPRQRDSVPNFRPPAFCTVVAKSRPFEEWPIYKASVLLQEQIYGMTGQEFEERCGSIPTSLSGLRQWASSVGLGAAMEGLHVQGMNLMVKNAINRYKGVLVKVENRNKKLVEANEAKNSSREERGLPPLRPPELGSAFGPDGRLVNPPGIDKSIRLYQGVSPVPVVKTTGRPTVHRLDIPAGEKGHVPLWQREAGLVKEGPRRRRMWYSNSNLKRSRKDRSAEASEARKADSVVVRVSVKEDWVDIDVRGLLRNVAWRGIERAGESTEDLLSLFSGDPVVDPSRDSVVFLYKEGVVDVLSKKVVGAGKSRKQLEKMVSEGPVALVSCDLGQTNYVAARVSVLDESLSPVRSFRVDPREFPSADGSQGVVGSLDRIRADSDRLEAKLLSEAEASLPEPVRAEIEFLRSERPSAVAGRLCLKLGIDPRSIPWEKMGSTTSFISEALSAKGSPLALHDGAPIKDSRFAHAARGRLSPESRKALNEALWERKSSSREYGVISRRKSEASRRMANAVLSESRRLTGLAVVAVNLEDLNMVSKFFHGRGKRAPGWAGFFTPKMENRWFIRSIHKAMCDLSKHRGITVIESRPERTSISCPECGHCDPENRSGERFSCKSCGVSLHADFEVATRNLERVALTGKPMPRRENLHSPEGATASRKTRKKPREATASTFLDLRSVLSSAENEGSGPAARAG

SEQ ID NO: 169 - protein, 725 aa, Artificial Sequence
  Synthetic polypeptide
MLPPSNKIGKSMSLKEFINKRNFKSSIIKQAGKILKKEGEEAVKKYLDDNYVEGYKKRDFPITAKCNIVASNRKIEDFDISKFSSFIQNYVFNLNKDNFEEFSKIKYNRKSFDELYKKIANEIGLEKPNYENIQGEIAVIRNAINIYNGVLKKVENRNKKIQEKNQSKDPPKLLSAFDDNGFLAERPGINETIYGYQSVRLRHLDVEKDKDIIVQLPDIYQKYNKKSTDKISVKKRLNKYNVDEYGKLISKRRKERINKDDAILCVSNFGDDWIIFDARGLLRQTYRYKLKKKGLCIKDLLNLFTGDPIINPTKTDLKEALSLSFKDGIINNRTLKVKNYKKCPELISELIRDKGKVAMISIDLGQTNPISYRLSKFTANNVAYIENGVISEDDIVKMKKWREKSDKLENLIKEEAIASLSDDEQREVRLYENDIADNTKKKILEKFNIREEDLDFSKMSNNTYFIRDCLKNKNIDESEFTFEKNGKKLDPTDACFAREYKNKLSELTRKKINEKIWEIKKNSKEYHKISIYKKETIRYIVNKLIKQSKEKSECDDIIVNIEKLQIGGNFFGGRGKRDPGWNNFFLPKEENRWFINACHKAFSELAPHKGIIVIESDPAYTSQTCPKCENCDKENRNGEKFKCKKCNYEANADIDVATENLEKIAKNGRRLIKNFDQLGERLPGAEMPGGARKRKPSKSLPKNGRGAGVGSEPELINQSPSQVIA

SEQ ID NO: 170 - protein, 718 aa, Artificial Sequence
  Synthetic polypeptide
VPDKKETPLVALCKKSFPGLRFKKHDSRQAGRILKSKGEGAAVAFLEGKGGTTQPNFKPPVKCNIVAMSRPLEEWPIYKASVVIQKYVYAQSYEEFKATDPGKSEAGLRAWLKATRVDTDGYFNVQGLNLIFQNARATYEGVLKKVENRNSKKVAKIEQRNEHRAERGLPLLTLDEPETALDETGHLRHRPGINCSVFGYQHMKLKPYVPGSIPGVTGYSRDPSTPIAACGVDRLEIPEGQPGYVPPWDRENLSVKKHRRKRASWARSRGGAIDDNMLLAVVRVADDWALLDLRGLLRNTQYRKLLDRSVPVTIESLLNLVTNDPTLSVVKKPGKPVRYTATLIYKQGVVPVVKAKVVKGSYVSKMLDDTTETFSLVGVDLGVNNLIAANALRIRPGKCVERLQAFTLPEQTVEDFFRFRKAYDKHQENLRLAAVRSLTAEQQAEVLALDTFGPEQAKMQVCGHLGLSVDEVPWDKVNSRSSILSDLAKERGVDDTLYMFPFFKGKGKKRKTEIRKRWDVNWAQHFRPQLTSETRKALNEAKWEAERNSSKYHQLSIRKKELSRHCVNYVIRTAEKRAQCGKVIVAVEDLHHSFRRGGKGSRKSGWGGFFAAKQEGRWLMDALFGAFCDLAVHRGYRVIKVDPYNTSRTCPECGHCDKANRDRVNREAFICVCCGYRGNADIDVAAYNIAMVAITGVSLRKAARASVASTPLESLAAE

SEQ ID NO: 171 - protein, 708 aa, Artificial Sequence
  Synthetic polypeptide
MSKTKELNDYQEALARRLPGVRHQKSVRRAARLVYDRQGEDAMVAFLDGKEVDEPYTLQPPAKCHILAVSRPIEEWPIARVTMAVQEHVYALPVHEVEKSRPETTEGSRSAWFKNSGVSNHGVTHAQTLNAILKNAYNVYNGVIKKVENRNAKKRDSLAAKNKSRERKGLPHFKADPPELATDEQGYLLQPPSPNSSVYLVQQHLRTPQIDLPSGYTGPVVDPRSPIPSLIPIDRLAIPPGQPGYVPLHDREKLTSNKHRRMKLPKSLRAQGALPVCFRVFDDWAVVDGRGLLRHAQYRRLAPKNVSIAELLELYTGDPVIDIKRNLMTFRFAEAVVEVTARKIVEKYHNKYLLKLTEPKGKPVREIGLVSIDLNVQRLIALAIYRVHQTGESQLALSPCLHREILPAKGLGDFDKYKSKFNQLTEEILTAAVQTLTSAQQEEYQRYVEESSHEAKADLCLKYSITPHELAWDKMTSSTQYISRWLRDHGWNASDFTQITKGRKKVERLWSDSRWAQELKPKLSNETRRKLEDAKHDLQRANPEWQRLAKRKQEYSRHLANTVLSMAREYTACETVVIAIENLPMKGGFVDGNGSRESGWDNFFTHKKENRWMIKDIHKALSDLAPNRGVHVLEVNPQYTSQTCPECGHRDKANRDPIQRERFCCTHCGAQRHADLEVATHNIAMVATTGKSLTGKSLAPQRLQEAAE

SEQ ID NO: 172 - protein, 491 aa, Artificial Sequence
  Synthetic polypeptide
VLLSDRIQYTDPSAPIPAMTVVDRRKIKKGEPGYVPPFMRKNLSTNKHRRMRLSRGQKEACALPVGLRLPDGKDGWDFIIFDGRALLRACRRLRLEVTSMDDVLDKFTGDPRIQLSPAGETIVTCMLKPQHTGVIQQKLITGKMKDRLVQLTAEAPIAMLTVDLGEHNLVACGAYTVGQRRGKLQSERLEAFLLPEKVLADFEGYRRDSDEHSETLRHEALKALSKRQQREVLDMLRTGADQARESLCYKYGLDLQALPWDKMSSNSTFIAQHLMSLGFGESATHVRYRPKRKASERTILKYDSRFAAEEKIKLTDETRRAWNEAIWECQRASQEFRCLSVRKLQLARAAVNWTLTQAKQRSRCPRVVVVVEDLNVRFMHGGGKRQEGWAGFFKARSEKRWFIQALHKAYTELPTNRGIHVMEVNPARTSITCTKCGYCDPENRYGEDFHCRNPKCKVRGGHVANADLDIATENLARVALSGPMPKAPKLK

SEQ ID NO: 173 - protein, 848 aa, Artificial Sequence
  Synthetic polypeptide
MTPSFGYQMIIVTPIHHASGAWATLRLLFLNPKTSGVMLGMTKTKSAFALMREEVFPGLLFKSADLKMAGRKFAKEGREAAIEYLRGKDEERPANFKPPAKGDIIAQSRPFDQWPIVQVSQAIQKYIFGLTKAEFDATKTLLYGEGNHPTTESRRRWFEATGVPDFGFTSAQGLNAIFSSALARYEGVIQKVENRNEKRLKKLSEKNQRLVEEGHAVEAYVPETAFHTLESLKALSEKSLVPLDDLMDKIDRLAQPPGINPCLYGYQQVAPYIYDPENPRGVVLPDLYLGYCRKPDDPITACPNRLDIPKGQPGYIPEHQRGQLKKHGRVRRFRYTNPQAKARAKAQTAILAVLRIDEDWVVMDLRGLLRNVYFREVAAPGELTARTLLDTFTGCPVLNLRSNVVTFCYDIESKGALHAEYVRKGWATRNKLLDLTKDGQSVALLSVDLGQRHPVAVMISRLKRDDKGDLSEKSIQVVSRTFADQYVDKLKRYRVQYDALRKEIYDAALVSLPPEQQAEIRAYEAFAPGDAKANVLSVMFQGEVSPDELPWDKMNTNTHYISDLYLRRGGDPSRVFFVPQPSTPKKNAKKPPAPRKPVKRTDENVSHMPEFRPHLSNETREAFQKAKWTMERGNVRYAQLSRFLNQIVREANNWLVSEAKKLTQCQTVVWAIEDLHVPFFHGKGKYHETWDGFFRQKKEDRWFVNVFHKAISERAPNKGEYVMEVAPYRTSQRCPVCGFVDADNRHGDHFKCLRCGVELHADLEVATWNIALVAVQGHGIAGPPREQSCGGETAGTARKGKNIKKNKGLADAVTVEAQDSEGGSKKDAGTARNPVYIPSESQVNCPAP

SEQ ID NO: 174 - protein, 781 aa, Artificial Sequence
  Synthetic polypeptide
MKPKTPKPPKTPVAALIDKHFPGKRFRASYLKSVGKKLKNQGEDVAVRFLTGKDEERPPNFQPPAKSNIVAQSRPIEEWPIHKVSVAVQEYVYGLTVAEKEACSDAGESSSSHAAWFAKTGVENFGYTSVQGLNKIFPPTFNRFDGVIKKVENRNEKKRQKATRINEAKRNKGQSEDPPEAEVKATDDAGYLLQPPGINHSVYGYQSITLCPYTAEKFPTIKLPEEYAGYHSNPDAPIPAGVPDRLAIPEGQPGHVPEEHRAGLSTKKHRRVRQWYAMANWKPKPKRTSKPDYDRLAKARAQGALLIVIRIDEDWVVVDARGLLRNVRWRSLGKREITPNELLDLFTGDPVLDLKRGVVTFTYAEGVVNVCSRSTTKGKQTKVLLDAMTAPRDGKKRQIGMVAVDLGQTNPIAAEYSRVGKNAAGTLEATPLSRSTLPDELLREIALYRKAHDRLEAQLREEAVLKLTAEQQAENARYVETSEEGAKLALANLGVDTSTLPWDAMTGWSTCISDHLINHGGDTSAVFFQTIRKGTKKLETIKRKDSSWADIVRPRLTKETREALNDFLWELKRSHEGYEKLSKRLEELARRAVNHVVQEVKWLTQCQDIVIVIEDLNVRNFHGGGKRGGGWSNFFTVKKENRWFMQALHKAFSDLAAHRGIPVLEVYPARTSITCLGCGHCDPENRDGEAFVCQQCGATFHADLEVATRNIARVALTGEAMPKAPAREQPGGAKKRGTSRRRKLTEVAVKSAEPTIHQAKNQQLNGTSRDPVYKGSELPAL

SEQ ID NO: 175 - protein, 767 aa, Artificial Sequence
  Synthetic polypeptide
MSEITDLLKANFKGKTFKSADMRMAGRILKKSGAQAVIKYLSDKGAVDPPDFRPPAKCNIIAQSRPFDEWPICKASMAIQQHIYGLTKNEFDESSPGTSSASHEQWFAKTGVDTHGFTHVQGLNLIFQHAKKRYEGVIKKVENYNEKERKKFEGINERRSKEGMPLLEPRLRTAFGDDGKFAEKPGVNPSIYLYQQTSPRPYDKTKHPYVHAPFELKEITTIPTQDDRLKIPFGAPGHVPEKHRSQLSMAKHKRRRAWYALSQNKPRPPKDGSKGRRSVRDLADLKAASLADAIPLVSRVGFDWVVIDGRGLLRNLRWRKLAHEGMTVEEMLGFFSGDPVIDPRRNVATFIYKAEHATVKSRKPIGGAKRAREELLKATASSDGVIRQVGLISVDLGQTNPVAYEISRMHQANGELVAEHLEYGLLNDEQVNSIQRYRAAWDSMNESFRQKAIESLSMEAQDEIMQASTGAAKRTREAVLTMFGPNATLPWSRMSSNTTCISDALIEVGKEEETNFVTSNGPRKRTDAQWAAYLRPRVNPETRALLNQAVWDLMKRSDEYERLSKRKLEMARQCVNFVVARAEKLTQCNNIGIVLENLVVRNFHGSGRRESGWEGFFEPKRENRWFMQVLHKAFSDLAQHRGVMVFEVHPAYSSQTCPACRYVDPKNRSSEDRERFKCLKCGRSFNADREVATFNIREIARTGVGLPKPDCERSRGVQTTGTARNPGRSLKSNKNPSEPKRVLQSKTRKKITSTETQNEPLATDLKT

SEQ ID NO: 176 - protein, 760 aa, Artificial Sequence
  Synthetic polypeptide
MTPKTESPLSALCKKHFPGKRFRTNYLKDAGKILKKHGEDAVVAFLSDKQEDEPANFCPPAKVHILAQSRPFEDWPINLASKAIQTYVYGLTADERKTCEPGTSKESHDRWFKETGVDHHGFTSVQGLNLIFKHTLNRYDGVIKKVETRNEKRRSSVVRINEKKAAEGLPLIAAEAEETAFGEDGRLLQPPGVNHSIYCFQQVSPQPYSSKKHPQVVLPHAVQGVDPDAPIPVGRPNRLDIPKGQPGYVPEWQRPHLSMKCKRVRMWYARANWRRKPGRRSVLNEARLKEASAKGALPIVLVIGDDWLVMDARGLLRSVFWRRVAKPGLSLSELLNVTPTGLFSGDPVIDPKRGLVTFTSKLGVVAVHSRKPTRGKKSKDLLLKMTKPTDDGMPRHVGMVAIDLGQTNPVAAEYSRVVQSDAGTLKQEPVSRGVLPDDLLKDVARYRRAYDLTEESIRQEAIALLSEGHRAEVTKLDQTTANETKRLLVDRGVSESLPWEKMSSNTTYISDCLVALGKTDDVFFVPKAKKGKKETGIAVKRKDHGWSKLLRPRTSPEARKALNENQWAVKRASPEYERLSRRKLELGRRCVNHIIQETKRWTQCEDIVVVLEDLNVGFFHGSGKRPDGWDNFFVSKRENRWFIQVLHKAFGDLATHRGTHVIEVHPARTSITCIKCGHCDAGNRDGESFVCLASACGDRRHADLEVATRNVARVAITGERMPPSEQARDVQKAGGARKRKPSARNVKSSYPAVEPAPASP

SEQ ID NO: 177 - protein, 752 aa, Artificial Sequence
  Synthetic polypeptide
MSDNKMKKLSKEEKPLTPLQILIRKYIDKSQYPSGFKTTIIKQAGVRIKSVKSEQDEINLANWIISKYDPTYIKRDFNPSAKCQIIATSRSVADFDIVKMSNKVQEIFFASSHLDKNVFDIGKSKSDHDSWFERNNVDRGIYTYSNVQGMNLIFSNTKNTYLGVAVKAQNKFSSKMKRIQDINNFRITNHQSPLPIPDEIKIYDDAGFLLNPPGVNPNIFGYQSCLLKPLENKEIISKTSFPEYSRLPADMIEVNYKISNRLKFSNDQKGFIQFKDKLNLFKINSQELFSKRRRLSGQPILLVASFGDDWVVLDGRGLLRQVYYRGIAKPGSITISELLGFFTGDPIVDPIRGVVSLGFKPGVLSQETLKTTSARIFAEKLPNLVLNNNVGLMSIDLGQTNPVSYRLSEITSNMSVEHICSDFLSQDQISSIEKAKTSLDNLEEEIAIKAVDHLSDEDKINFANFSKLNLPEDTRQSLFEKYPELIGSKLDFGSMGSGTSYIADELIKFENKDAFYPSGKKKFDLSFSRDLRKKLSDETRKSYNDALFLEKRTNDKYLKNAKRRKQIVRTVANSLVSKIEELGLTPVINIENLAMSGGFFDGRGKREKGWDNFFKVKKENRWVMKDFHKAFSELSPHHGVIVIESPPYCTSVTCTKCNFCDKKNRNGHKFTCQRCGLDANADLDIATENLEKVAISGKRMPGSERSSDERKVAVARKAKSPKGKAIKGVKCTITDEPALLSANSQDCSQSTS

SEQ ID NO: 178 - protein, 747 aa, Artificial Sequence
  Synthetic polypeptide
MALSLAEVRERHFKGLRFRSSYLKRAGKILKKEGEAACVAYLTGKDEESPPNFKPPAKCDVVAQSRPFEEWPIVQASVAVQSYVYGLTKEAFEAFNPGTTKQSHEACLAATGIDTCGYSNVQGLNLIFRQAKNRYEGVITKVENRNKKAKKKLTRKNEWRQKNGHSELPEAPEELTFNDEGRLLQPPGINPSLYTYQQISPTPWSPKDSSILPPQYAGYERDPNAPIPFGVAKDRLTIASGCPGYIPEWMRTAGEKTNPRTQKKFMHPGLSTRKNKRMRLPRSVRSAPLGALLVTIHLGEDWLVLDVRGLLRNARWRGVAPKDISTQGLLNLFTGDPVIDTRRGVVTFTYKPETVGIHSRTWLYKGKQTKEVLEKLTQDQTVALVAIDLGQTNPVSAAASRVSRSGENLSIETVDRFFLPDELIKELRLYRMAHDRLEERIREESTLALTEAQQAEVRALEHVVRDDAKNKVCAAFNLDAASLPWDQMTSNTTYLSEAILAQGVSRDQVFFTPNPKKGSKEPVEVMRKDRAWVYAFKAKLSEETRKAKNEALWALKRASPDYARLSKRREELCRRSVNMVINRAKKRTQCQVVIPVLEDLNIGFFHGSGKRLPGWDNFFVAKKENRWLMNGLHKSFSDLAVHRGFYVFEVMPHRTSITCPACGHCDSENRDGEAFVCLSCKRTYHADLDVATHNLTQVAGTGLPMPEREHPGGTKKPGGSRKPESPQTHAPILHRTDYSESADRLGS

SEQ ID NO: 179 - protein, 733 aa, Artificial Sequence
  Synthetic polypeptide
QAVIKYLSDKGAVDPPDFRPPAKCNIIAQSRPFDEWPICKASMAIQQHIYGLTKNEFDESSPGTSSASHEQWFAKTGVDTHGFTHVQGLNLIFQHAKKRYEGVIKKVENYNEKERKKFEGINERRSKEGMPLLEPRLRTAFGDDGKFAEKPGVNPSIYLYQQTSPRPYDKTKHPYVHAPFELKEITTIPTQDDRLKIPFGAPGHVPEKHRSQLSMAKHKRRRAWYALSQNKPRPPKDGSKGRRSVRDLADLKAASLADAIPLVSRVGFDWVVIDGRGLLRNLRWRKLAHEGMTVEEMLGFFSGDPVIDPRRNVATFIYKAEHATVKSRKPIGGAKRAREELLKATASSDGVIRQVGLISVDLGQTNPVAYEISRMHQANGELVAEHLEYGLLNDEQVNSIQRYRAAWDSMNESFRQKAIESLSMEAQDEIMQASTGAAKRTREAVLTMFGPNATLPWSRMSSNTTCISDALIEVGKEEETNFVTSNGPRKRTDAQWAAYLRPRVNPETRALLNQAVWDLMKRSDEYERLSKRKLEMARQCVNFVVARAEKLTQCNNIGIVLENLVVRNFHGSGRRESGWEGFFEPKRENRWFMQVLHKAFSDLAQHRGVMVFEVHPAYSSQTCPACRYVDPKNRSSEDRERFKCLKCGRSFNADREVATFNIREIARTGVGLPKPDCERSRDVQTPGTARKSGRSLKSQDNLSEPKRVLQSKTRKKITSTETQNEPLATDLKT

SEQ ID NO: 180 - protein, 702 aa, Artificial Sequence
  Synthetic polypeptide
MIKEQSELSKLIEKYYPGKKFYSNDLKQAGKHLKKSEHLTAKESEELTVEFLKSCKEKLYDFRPPAKALIISTSRPFEEWPIYKASESIQKYIYSLTKEELEKYNISTDKTSQENFFKESLIDNYGFANVSGLNLIFQHTKAIYDGVLKKVNNRNNKILKKYKRKIEEGIEIDSPELEKAIDESGHFINPPGINKNIYCYQQVSPTIFNSFKETKIICPFNYKRNPNDIIQKGVIDRLAIPFGEPGYIPDHQRDKVNKHKKRIRKYYKNNENKNKDAILAKINIGEDWVLFDLRGLLRNAYWRKLIPKQGITPQQLLDMFSGDPVIDPIKNNITFIYKESIIPIHSESIIKTKKSKELLEKLTKDEQIALVSIDLGQTNPVAARFSRLSSDLKPEHVSSSFLPDELKNEICRYREKSDLLEIEIKNKAIKMLSQEQQDEIKLVNDISSEELKNSVCKKYNIDNSKIPWDKMNGFTTFIADEFINNGGDKSLVYFTAKDKKSKKEKLVKLSDKKIANSFKPKISKETREILNKITWDEKISSNEYKKLSKRKLEFARRATNYLINQAKKATRLNNVVLVVEDLNSKFFHGSGKREDGWDNFFIPKKENRWFIQALHKSLTDVSIHRGINVIEVRPERTSITCPKCGCCDKENRKGEDFKCIKCDSVYHADLEVATFNIEKVAITGESMPKPDCERLGGEESIG

SEQ ID NO: 181 - protein, 661 aa, Artificial Sequence
  Synthetic polypeptide
VAFLDGKEVDEPYTLQPPAKCHILAVSRPIEEWPIARVTMAVQEHVYALPVHEVEKSRPETTEGSRSAWFKNSGVSNHGVTHAQTLNAILKNAYNVYNGVIKKVENRNAKKRDSLAAKNKSRERKGLPHFKADPPELATDEQGYLLQPPSPNSSVYLVQQHLRTPQIDLPSGYTGPVVDPRSPIPSLIPIDRLAIPPGQPGYVPLHDREKLTSNKHRRMKLPKSLRAQGALPVCFRVFDDWAVVDGRGLLRHAQYRRLAPKNVSIAELLELYTGDPVIDIKRNLMTFRFAEAVVEVTARKIVEKYHNKYLLKLTEPKGKPVREIGLVSIDLNVQRLIALAIYRVHQTGESQLALSPCLHREILPAKGLGDFDKYKSKFNQLTEEILTAAVQTLTSAQQEEYQRYVEESSHEAKADLCLKYSITPHELAWDKMTSSTQYISRWLRDHGWNASDFTQITKGRKKVERLWSDSRWAQELKPKLSNETRRKLEDAKHDLQRANPEWQRLAKRKQEYSRHLANTVLSMAREYTACETVVIAIENLPMKGGFVDGNGSRESGWDNFFTHKKENRWMIKDIHKALSDLAPNRGVHVLEVNPQYTSQTCPECGHRDKANRDPIQRERFCCTHCGAQRHADLEVATHNIAMVATTGKSLTGKSLAPQRLQ

SEQ ID NO: 182 - protein, 531 aa, Artificial Sequence
  Synthetic polypeptide
LEIPEGEPGHVPWFQRMDIPEGQIGHVNKIQRFNFVHGKNSGKVKFSDKTGRVKRYHHSKYKDATKPYKFLEESKKVSALDSILAIITIGDDWVVFDIRGLYRNVFYRELAQKGLTAVQLLDLFTGDPVIDPKKGIITFSYKEGVVPVFSQKIVSRFKSRDTLEKLTSQGPVALLSVDLGQNEPVAARVCSLKNINDKIALDNSCRIPFLDDYKKQIKDYRDSLDELEIKIRLEAINSLDVNQQVEIRDLDVFSADRAKASTVDMFDIDPNLISWDSMSDARFSTQISDLYLKNGGDESRVYFEINNKRIKRSDYNISQLVRPKLSDSTRKNLNDSIWKLKRTSEEYLKLSKRKLELSRAVVNYTIRQSKLLSGINDIVIILEDLDVKKKFNGRGIRDIGWDNFFSSRKENRWFIPAFHKSFSELSSNRGLCVIEVNPAWTSATCPDCGFCSKENRDGINFTCRKCGVSYHADIDVATLNIARVAVLGKPMSGPADRERLGGTKKPRVARSRKDMKRKDISNGTVEVMVTA

SEQ ID NO: 183 - protein, 479 aa, Artificial Sequence
  Synthetic polypeptide
IPSFGYLDRLKIAKGQPGYIPEWQRETINPSKKVRRYWATNHEKIRNAIPLVVFIGDDWVIIDGRGLLRDARRRKLADKNTTIEQLLEMVSNDPVIDSTRGIATLSYVEGVVPVRSFIPIGEKKGREYLEKSTQKESVTLLSVDIGQINPVSCGVYKVSNGCSKIDFLDKFFLDKKHLDAIQKYRTLQDSLEASIVNEALDEIDPSFKKEYQNINSQTSNDVKKSLCTEYNIDPEAISWQDITAHSTLISDYLIDNNITNDVYRTVNKAKYKTNDFGWYKKFSAKLSKEAREALNEKIWELKIASSKYKKLSVRKKEIARTIANDCVKRAETYGDNVVVAMESLTKNNKVMSGRGKRDPGWHNLGQAKVENRWFIQAISSAFEDKATHHGTPVLKVNPAYTSQTCPSCGHCSKDNRSSKDRTIFVCKSCGEKFNADLDVATYNIAHVAFSGKKLSPPSEKSSATKKPRSARKSKKSRKS

SEQ ID NO: 184 - protein, 452 aa, Artificial Sequence
  Synthetic polypeptide
SPIEKLLNGLLVKITFGNDWIICDARGLLDNVQKGIIHKSYFTNKSSLVDLIDLFTCNPIVNYKNNVVTFCYKEGVVDVKSFTPIKSGPKTQENLIKKLKYSRFQNEKDACVLGVGVDVGVTNPFAINGFKMPVDESSEWVMLNEPLFTIETSQAFREEIMAYQQRTDEMNDQFNQQSIDLLPPEYKVEFDNLPEDINEVAKYNLLHTLNIPNNFLWDKMSNTTQFISDYLIQIGRGTETEKTITTKKGKEKILTIRDVNWFNTFKPKISEETGKARTEIKRDLQKNSDQFQKLAKSREQSCRTWVNNVTEEAKIKSGCPLIIFVIEALVKDNRVFSGKGHRAIGWHNFGKQKNERRWWVQAIHKAFQEQGVNHGYPVILCPPQYTSQTCPKCNHVDRDNRSGEKFKCLKYGWIGNADLDVGAYNIARVAITGKALSKPLEQKKIKKAKNKT

SEQ ID NO: 185 - protein, 425 aa, Artificial Sequence
  Synthetic polypeptide
LLDNVQKGIIHKSYFTNKSSLVDLIDLFTCNPIVNYKNNVVTFCYKEGVVDVKSFTPIKSGPKTQENLIKKLKYSRFQNEKDACVLGVGVDVGVTNPFAINGFKMPVDESSEWVMLNEPLFTIETSQAFREEIMAYQQRTDEMNDQFNQQSIDLLPPEYKVEFDNLPEDINEVAKYNLLHTLNIPNNFLWDKMSNTTQFISDYLIQIGRGTETEKTITTKKGKEKILTIRDVNWFNTFKPKISEETGKARTEIKRDLQKNSDQFQKLAKSREQSCRTWVNNVTEEAKIKSGCPLIIFVIEALVKDNRVFSGKGHRAIGWHNFGKQKNERRWWVQAIHKAFQEQGVNHGYPVILCPPQYTSQTCPKCNHVDRDNRSGEKFKCLKYGWIGNADLDVGAYNIARVAITGKALSKPLEQKKIKKAKNKT

SEQ ID NO: 186 - protein, 735 aa, Artificial Sequence
  Synthetic polypeptide
MIKPTVSQFLTPGFKLIRNHSRTAGLKLKNEGEEACKKFVRENEIPKDECPNFQGGPAIANIIAKSREFTEWEIYQSSLAIQEVIFTLPKDKLPEPILKEEWRAQWLSEHGLDTVPYKEAAGLNLIIKNAVNTYKGVQVKVDNKNKNNLAKINRKNEIAKLNGEQEISFEEIKAFDDKGYLLQKPSPNKSIYCYQSVSPKPFITSKYHNVNLPEEYIGYYRKSNEPIVSPYQFDRLRIPIGEPGYVPKWQYTFLSKKENKRRKLSKRIKNVSPILGIICIKKDWCVFDMRGLLRTNHWKKYHKPTDSINDLFDYFTGDPVIDTKANVVRFRYKMENGIVNYKPVREKKGKELLENICDQNGSCKLATVDVGQNNPVAIGLFELKKVNGELTKTLISRHPTPIDFCNKITAYRERYDKLESSIKLDAIKQLTSEQKIEVDNYNNNFTPQNTKQIVCSKLNINPNDLPWDKMISGTHFISEKAQVSNKSEIYFTSTDKGKTKDVMKSDYKWFQDYKPKLSKEVRDALSDIEWRLRRESLEFNKLSKSREQDARQLANWISSMCDVIGIENLVKKNNFFGGSGKREPGWDNFYKPKKENRWWINAIHKALTELSQNKGKRVILLPAMRTSITCPKCKYCDSKNRNGEKFNCLKCGIELNADIDVATENLATVAITAQSMPKPTCERSGDAKKPVRARKAKAPEFHDKLAPSYTVVLREAVKRPAATKKAGQAKKKKEF

SEQ ID NO: 187 - protein, 18 aa, Artificial Sequence
  Synthetic peptide
KRPAATKKAGQAKKKKEF

SEQ ID NO: 188 - RNA, 50 nt, Artificial Sequence
  Synthetic oligonucleotide
gccaccccaaaaaugaaggggacuaaaacaccgaacgaaccaccagcaga

SEQ ID NO: 189 - RNA, 50 nt, Artificial Sequence
  Synthetic oligonucleotide
gccaccccaaaaaugaaggggacuaaaacacgaacgaaccaccagcagaa

SEQ ID NO: 190 - RNA, 50 nt, Artificial Sequence
  Synthetic oligonucleotide
gccaccccaaaaaugaaggggacuaaaacagaacgaaccaccagcagaag

SEQ ID NO: 191 - RNA, 50 nt, Artificial Sequence
  Synthetic oligonucleotide
gccaccccaaaaaugaaggggacuaaaacaaaacagaggugaggcgguca

SEQ ID NO: 192 - RNA, 50 nt, Artificial Sequence
  Synthetic oligonucleotide
gccaccccaaaaaugaaggggacuaaaacaacagaggugaggcggucagu

SEQ ID NO: 193 - RNA, 50 nt, Artificial Sequence
  Synthetic oligonucleotide
gccaccccaaaaaugaaggggacuaaaacacagaggugaggcggucagua

SEQ ID NO: 194 - DNA, 5 bp, Artificial Sequence
  Synthetic oligonucleotide
aaaaa

SEQ ID NO: 195 - DNA, 5 bp, Artificial Sequence
  Synthetic oligonucleotide
ccccc

SEQ ID NO: 196 - DNA, 5 bp, Artificial Sequence
  Synthetic oligonucleotide
ggggg

SEQ ID NO: 197 - DNA, 5 bp, Artificial Sequence
  Synthetic oligonucleotide
ttttt

SEQ ID NO: 198 - DNA, 6 bp, Artificial Sequence
  Synthetic oligonucleotide
ttatta

SEQ ID NO: 199 - DNA, 10 bp, Artificial Sequence
  Synthetic oligonucleotide
attattatta

SEQ ID NO: 200 - DNA, 7 bp, Artificial Sequence
  Synthetic oligonucleotide
ttttttt

SEQ ID NO: 201 - DNA, 11 bp, Artificial Sequence
  Synthetic oligonucleotide
ttttttttttt

SEQ ID NO: 202 - DNA, 35 bp, Artificial Sequence
  Synthetic oligonucleotide
ccggcagccataacgccgtgaatacgttctgccgg

1. A composition comprising:
a) a Type VI Clustered Regularly Interspaced Short Palindromic Repeats (CRISPR)-Cas nuclease; and
b) an engineered guide nucleic acid comprising a first segment that is reverse complementary to a segment of a target single-stranded deoxyribonucleic acid, wherein the engineered guide nucleic acid comprises a second segment that binds to the Type VI CRISPR-Cas nuclease nuclease to form a complex.

2. The composition of claim 1, further comprising an RNA reporter or a DNA reporter.

3. (canceled)

4. (canceled)

5. The composition of claim 1, wherein the composition further comprises the target single-stranded deoxyribonucleic acid.

6. The composition of claim 5, wherein the target single-stranded deoxyribonucleic acid is an amplicon of a nucleic acid.

7. The composition of claim 6, wherein the nucleic acid is a deoxyribonucleic acid.

8. The composition of claim 6, wherein the nucleic acid is a ribonucleic acid.

9. (canceled)

10. (canceled)

11. The composition of claim 1, wherein the Type VI CRISPR-Cas nuclease is a Cas13 protein.

12. The composition of claim 11, wherein the Cas13 protein comprises a Cas13a polypeptide, a Cas13b polypeptide, a Cas13c polypeptide, a Cas13c polypeptide, a Cas13d polypeptide, or a Cas13e polypeptide.

13. (canceled)

14. The composition of claim 12, wherein the Cas13 protein comprises the Cas13a polypeptide, and wherein the Cas13a polypeptide is LbuCas13a or LwaCas13a.

15. The composition of claim 1, wherein the Type VI CRISPR-Cas nuclease comprises an amino acid sequence having at least 80% sequence identity to any one of SEQ ID NO: 18-SEQ ID NO: 35.

16. The composition of claim 15, wherein the Type VI CRISPR-Cas nuclease comprises an amino acid sequence having at least 80% sequence identity to SEQ ID NO: 19.

17. The composition of claim 1, wherein the composition has a pH from pH 6.8 to pH 8.2.

18. The composition of claim 5, wherein the target single-stranded deoxyribonucleic acid lacks a guanine at the 3′ end.

19. The composition of claim 5, wherein the terminal 3′ nucleotide in the segment of the target single-stranded deoxyribonucleic acid is A, C or T.

20. The composition of claim 15, wherein the Type VI CRISPR-Cas nuclease comprises an amino acid sequence having at least 80% sequence identity to SEQ ID NO: 25.

21. (canceled)

22. (canceled)

23. The composition of claim 1, wherein the target single-stranded deoxyribonucleic acid has a length of from 18 to 100 nucleotides.

24. (canceled)

25. (canceled)

26. The composition of claim 1, wherein the composition is comprised within a support medium.

27. The composition of claim 1, further comprising a second engineered guide nucleic acid comprising a first segment that is reverse complementary to a segment of a second target deoxyribonucleic acid; and
a Type V CRISPR-Cas nuclease, wherein the second engineered guide nucleic acid comprises a second segment that binds to the Type V CRISPR-Cas nuclease to form a complex.

28. (canceled)

29. (canceled)

30. (canceled)

31. The composition of claim 1, wherein the target single-stranded deoxyribonucleic acid is a reverse transcribed ribonucleic acid.

32. The composition of claim 1, wherein the composition further comprises a reagent for reverse transcription, amplification, in vitro transcription, or a combination thereof.

33. (canceled)

34. (canceled)

35. The composition of claim 32, wherein the composition further comprises the reagent for reverse transcription, and wherein the reagent for reverse transcription comprises a reverse transcriptase, an oligonucleotide primer, dNTPs, or any combination thereof.

36. The composition of claim 32, wherein the composition further comprises the reagent for amplification, and wherein the reagent for amplification comprises a primer, a polymerase, dNTPs, or any combination thereof.

37. The composition of claim 32, wherein the composition further comprises the reagent for in vitro transcription, and wherein the reagent for in vitro transcription comprises an RNA polymerase, NTPs, a primer, or any combination thereof.

38. A method of assaying for a target single-stranded deoxyribonucleic acid in a sample, the method comprising:
contacting the sample to the composition of any one of claims 1-37; and
assaying for a signal produced by cleavage of at least some RNA reporters of a plurality of RNA reporters by the Type VI CRISPR-Cas nuclease upon hybridization of the first segment of the engineered guide nucleic acid to the segment of the target single-stranded deoxyribonucleic acid.

39. A method of assaying for a target ribonucleic acid in a sample, the method comprising:
amplifying the target ribonucleic acid in a sample to produce a target single-stranded deoxyribonucleic acid;
contacting the target single-stranded deoxyribonucleic acid to the composition of any one of claims 1-37; and
assaying for a signal produced by cleavage of at least some RNA reporters of a plurality of RNA reporters by the Type VI CRISPR-Cas nuclease upon hybridization of the first segment of the engineered guide nucleic acid to the segment of the target single-stranded deoxyribonucleic acid.

40. (canceled)

41. (canceled)

42. (canceled)

43. A kit comprising:
(a) a Type VI Clustered Regularly Interspaced Short Palindromic Repeats (CRISPR)-Cas nuclease;
(b) an engineered guide nucleic acid comprising a first segment that is reverse complementary to a segment of a target single-stranded deoxyribonucleic acid; and
(c) a detector nucleic acid comprising a detection moiety.

44. The kit of claim 43, further comprising a second engineered guide nucleic acid.

45. A method of determining the presence of a target single-stranded deoxyribonucleic acid in a sample, the method comprising:
assaying for a signal produced by cleavage of a detection moiety from an RNA reporter, wherein the cleavage occurs when the target single-stranded deoxyribonucleic acid is bound to a complex comprising a Type VI Clustered Regularly Interspaced Short Palindromic Repeats (CRISPR)-Cas nuclease and an engineered guide nucleic acid comprising a first segment that is reverse complementary to a segment of the target single-stranded deoxyribonucleic acid, wherein if the target single-stranded deoxyribonucleic acid is present in the sample, the signal is detected, thereby determining the presence of the single-stranded deoxyribonucleic acid in the sample.
